(19) United States
(12) Patent Application Publication
(10) Pub. No.: US 2002/0081659 A1
(43) Pub. Date: Jun. 27, 2002

(54) Nucleic acids, proteins and antibodies

(76) Inventors: Craig A. Rosen, Laytonsville, MD (US); Steven M. Ruben, Olney, MD (US)

Correspondence Address: HUMAN GENOME SCIENCES INC, 9410 KEY WEST AVENUE, ROCKVILLE, MD, 20850

(21) Appl. No.: 09/925,297

(22) Filed: Aug. 10, 2001

Related U.S. Application Data
(63) Continuation-in-part of application No. PCT/US00/05989, filed on Mar. 8, 2000.
(60) Provisional application No. 60/124,270, filed on Mar. 12, 1999.

(51) Int. Cl. C12Q 1/68; G01N 33/53; C07H 21/04; C12P 21/02; C07K 14/435; C12N 5/06

(52) U.S. Cl. 435/69.1; 435/325; 435/320.1; 435/6; 435/7.1; 536/23.5; 530/350

(57) ABSTRACT

The present invention relates to novel pancreatic related polynucleotides, the polypeptides encoded by these polynucleotides herein collectively referred to as “pancreatic antigens,” and antibodies that immunospecifically bind these polypeptides, and the use of such pancreatic polynucleotides, antigens, and antibodies for detecting, treating, preventing and/or prognosing disorders of the pancreas, including, but not limited to, the presence of pancreatic cancer and pancreatic cancer metastases. More specifically, isolated pancreatic nucleic acid molecules are provided encoding novel pancreatic polypeptides. Novel pancreatic polypeptides and antibodies that bind to these polypeptides are provided. Also provided are vectors, host cells, and recombinant and synthetic methods for producing human pancreatic polynucleotides, polypeptides, and/or antibodies. The invention further relates to diagnostic and therapeutic methods useful for diagnosing, treating, preventing and/or prognosing disorders related to the pancreas, including pancreatic cancer, and therapeutic methods for treating such disorders. The invention further relates to screening methods for identifying agonists and antagonists of polynucleotides and polypeptides of the invention. The invention further relates to methods and/or compositions for inhibiting or promoting the production and/or function of the polypeptides of the invention.

[0001] This application is a claims benefit of priority under 35 U.S.C. §365(c) and §120 International Application Number PCT/US00/05989, filed Mar. 8, 2000 which was published by the International Bureau in the English language as International Publication Number WO00/55320 on Sep. 21, 2000 and under 35 U.S.C. §119(e) to U.S. Application No. 60/124,270 filed Mar. 12, 1999, both of which are hereby incorporated by reference herein.

### STATEMENT UNDER 37 C.F.R. §1.77(b)(4)

[0002] This application refers to a “Sequence Listing” listed below, which is provided as an electronic document on two identical compact discs (CD-R), labeled “Copy 1” and “Copy 2.” These compact discs each contain the following files, which are hereby incorporated in their entirety herein:

| Document | File Name | Size in bytes | Date of Creation |
|---|---|---|---|
| Sequence Listing | PA105SEQLIST.txt | 1,536,746 | 8/8/01 |

### FIELD OF THE INVENTION

[0003] The present invention relates to novel pancreatic related polynucleotides, the polypeptides encoded by these polynucleotides herein collectively referred to as “pancreatic antigens,” and antibodies that immunospecifically bind these polypeptides, and the use of such pancreatic polynucleotides, antigens, and antibodies for detecting, treating, preventing and/or prognosing disorders of the pancreas, including, but not limited to, the presence of pancreatic cancer and pancreatic cancer metastases. More specifically, isolated pancreatic nucleic acid molecules are provided encoding novel pancreatic polypeptides. Novel pancreatic polypeptides and antibodies that bind to these polypeptides are provided. Also provided are vectors, host cells, and recombinant and synthetic methods for producing human pancreatic polynucleotides, polypeptides, and/or antibodies. The invention further relates to diagnostic and therapeutic methods useful for diagnosing, treating, preventing and/or prognosing disorders related to the pancreas, including pancreatic cancer, and therapeutic methods for treating such disorders. The invention further relates to screening methods for identifying agonists and antagonists of polynucleotides and polypeptides of the invention. The invention further relates to methods and/or compositions for inhibiting or promoting the production and/or function of the polypeptides of the invention.

### BACKGROUND OF THE INVENTION

[0004] The pancreas is comprised of cells with two types of functions: 1) exocrine, in the secretion of digestive enzymes into the small intestine, and 2) endocrine, in the secretion of the hormones insulin and glucagon, which regulate blood glucose levels. Accordingly, the pancreas plays important roles in the Endocrine and Gastrointestinal Systems.

[0005] Inflammation of the pancreas, or pancreatitis, is probably the most common disease of this organ. The disorder may be confined to either singular or repeated acute episodes, or it may become a chronic disease. There are many factors associated with the onset of pancreatitis, including direct injury, certain drugs, viral infections, heredity, hyperlipidemia (increased levels of blood fats), and congenital derangements of the ductal system. Localized, severe abdominal and midback pain resulting from enzyme leakage, tissue damage, and nerve irritation is the most common symptom of acute pancreatitis. In severe cases, respiratory failure, shock, and even death may occur. Chronic pancreatitis rarely follows repeated acute attacks. It seems instead to be a separate disorder that results in mucus plugs and precipitation of calcium salts in the smaller pancreatic ducts. Cystic fibrosis is inherited, but it is not expressed unless both members of a pair of hemologous, or corresponding, chromosomes carry the trait. The major functional abnormality in persons with the disease appears to be the elaboration by mucous glands throughout the body of secretions containing greater than normal concentrations of protein and calcium. This imbalance leads to increased viscosity of the secretions and precipitation of mucus and organic constituents in gland ducts. The resulting plugging process in the pancreas almost invariably causes destruction and scarring of the acinar tissue, usually without damaging the islets of Langerhans. A similar process in the hepatic biliary system produces foci of fibrosis and bile duct proliferation, a singular form of cirrhosis.

[0006] Islet cells of the pancreas synthesize and secrete insulin, the primary hormone responsible for controlling the uptake, utilization, and storage of cellular nutrients. One of the most common diseases of the endocrine system is diabetes mellitus. Most patients can be classified as having either insulin-dependent diabetes mellitus (type I diabetes) or non-insulin-dependent diabetes mellitus (type II diabetes). Virtually all forms of diabetes mellitus are due to a decrease in the circulating concentration of insulin and a decrease in the response of peripheral tissues to insulin. These abnormalities lead to alterations in the metabolism of carbohydrates, lipids, ketones, and amino acids; the central feature of the syndrome is hyperglycemia.

[0007] Pancreatic cancer is the fourth leading cause of cancer death in the United States. According to the American Cancer Society, approximately 28,200 people will die of pancreatic cancer in the United States in 2000. The pancreas is a tongue-shaped glandular organ composed of both endocrine and exocrine gland portions, as well as ducts that connect the pancreas to the bile duct and small intestine. The endocrine portion of the pancreas secretes hormones, such as insulin and glucagon which are involved in blood sugar regulation, into the bloodstream. The exocrine portion of the pancreas produces pancreatic enzymes involved in the digestion of fats and proteins; these enzymes are delivered to the bile duct and into the small intestine.

[0008] Carcinoma of the pancreas arises primarily from the ductal system. The exocrine cells and endocrine cells of the pancreas form completely different types of tumors. These tumors can be either benign (noncancerous) or malignant (cancerous). Exocrine cells of the pancreas can form benign tumors, although these are much less common than cancers. Most of these benign tumors are cystadenomas. About 95% of cancers of the exocrine pancreas are adenocarcinomas. These adenocarcinomas usually begin in the ducts of the pancreas, but sometimes may develop from the acinar cells of the exocrine glands (the cells that actually produce the pancreatic enzymes). Less common cancers of the exocrine pancreas include adenosquamous carcinomas, squamous cell carcinomas, and giant cell carcinomas. These types are distinguished from one another based on their appearance under the microscope. Treatment of an exocrine pancreatic cancer is mostly based on how far it metastasized, however, and not its exact type. Tumors of the endocrine pancreas are much less common. As a group, they are known as neuroendocrine tumors, or more specifically, islet cell tumors. There are several subtypes of islet cell tumors that are named according to the type of hormone they produce. Islet cell tumors that produce insulin are known as insulinomas, and tumors that produce glucagon are called glucagonomas. Less often, islet cell tumors may produce other hormones. Most islet cell tumors are benign. Some are malignant and are called islet cell cancers or islet cell carcinomas.

[0009] The incidence of carcinoma of the pancreas has increased slightly (somewhat more in men than in women) and now exceeds cancer of the stomach. No certain risk factors have been identified, although suggestions have been made that pancreatic cancer occurs at increased rates among diabetics and persons with chronic pancreatitis. Pancreatic cancer is one of the most dangerous cancers, killing half its victims within 6 weeks and having a 5-year survival rate of only 4%. The diagnosis of pancreatic carcinoma is often associated with a poor prognosis, because most patients already have advanced disease. Radiation and chemotherapy have shown some promise as therapeutic agents if they are started promptly in the course of the disease and continued for long periods. Despite the many advances reported during the past few years, pancreatic cancer remains a profound therapeutic challenge. It is hoped that the increasing knowledge of the molecular biology of pancreatic carcinoma will lead to improvements in diagnosing, staging, and treating pancreatic adenocarcinoma (Brand et al., Curr Opin Oncol 10:362-6 (1998)).

[0010] There is a need, therefore, for identification and characterization of factors that modulate activation and differentiation of pancreatic cells, both normally and in disease states. In particular, there is a need to isolate and characterize additional molecules that mediate apoptosis, DNA repair, tumor-mediated angiogenesis, genetic imprinting, immune responses to tumors and tumor antigens and, among other things, that can play a role in detecting, preventing, ameliorating or correcting dysfunctions or diseases related to the pancreas.

[0011] The discovery of new human pancreatic associated polynucleotides, the polypeptides encoded by them, and antibodies that immunospecifically bind these polypeptides, satisfies a need in the art by providing new compositions which are useful in the diagnosis, treatment, prevention and/or prognosis of disorders of the pancreas, including, but not limited to, diabetes mellitus, diabetes insipidus, congenital pancreatic agenesis, pancreatic cancers (e.g., benign or malignant forms of pancreatic cancer, as well as any particular type of cancer arising from cells of the pancreas (e.g., duct cell carcinoma, acinar cell carcinoma, papillary carcinoma, adenosquamous carcinoma, undifferentiated carcinoma, mucinous carcinoma, giant cell carcinoma, mixed type pancreatic cancer, small cell carcinoma, cystadenocarcinoma, unclassified pancreatic cancers, pancreatoblastoma, adenocarcinoma, islet-cell tumors, cystic neoplasms, and papillary-cyctic neoplasm and the like), as well as any stage of such cancers (e.g., stages I to IV in severity)), cystic fibrosis, cyst (e.g., pancreatic pseudocyst), pancreatic fistula, insufficiency, pancreatic dysplasia, pancreatitis (e.g., chronic pancreatitis, acute pancreatitis, acute necrotizing pancreatitis, alcoholic pancreatitis, and pancreatic abscesses associated with pancreatic inflammation), and/or those disorders as described under “Endocrine Disorders” and/or “Gastrointestinal Disorders” below.

### SUMMARY OF THE INVENTION

[0012] The present invention includes isolated nucleic acid molecules comprising, or alternatively, consisting of, a pancreas and/or pancreatic cancer associated polynucleotide sequence disclosed in the sequence listing (as SEQ ID NOs:1 to 459) and/or contained in a human cDNA clone described in Tables 1, 2 and 5 and deposited with the American Type Culture Collection (“ATCC”). Fragments, variant, and derivatives of these nucleic acid molecules are also encompassed by the invention. The present invention also includes isolated nucleic acid molecules comprising, or alternatively consisting of, a polynucleotide encoding a pancreas and/or pancreatic cancer polypeptide. The present invention further includes pancreas and/or pancreatic cancer polypeptides encoded by these polynucleotides. Further provided for are amino acid sequences comprising, or alternatively consisting of, pancreas and/or pancreatic cancer polypeptides as disclosed in the sequence listing (as SEQ ID NOs: 460 to 918) and/or encoded by a human cDNA clone described in Tables 1, 2 and 5 and deposited with the ATCC. Antibodies that bind these polypeptides are also encompassed by the invention. Polypeptide fragments, variants, and derivatives of these amino acid sequences are also encompassed by the invention, as are polynucleotides encoding these polypeptides and antibodies that bind these polypeptides. Also provided are diagnostic methods for diagnosing and treating, preventing, and/or prognosing disorders related to the pancreas, including pancreatic cancer, and therapeutic methods for treating such disorders. The invention further relates to screening methods for identifying agonists and antagonists of pancreatic cancer antigens of the invention.

### DETAILED DESCRIPTION

[0013] Tables

[0014] Table 1 summarizes some of the pancreatic cancer antigens encompassed by the invention (including contig sequences (SEQ ID NO:X) and the cDNA clone related to the contig sequence) and further summarizes certain characteristics of the pancreatic cancer polynucleotides and the polypeptides encoded thereby. The first column shows the “SEQ ID NO:” for each of the 459 pancreatic cancer antigen polynucleotide sequences of the invention. The second column provides a unique “Sequence/Contig ID” identification for each pancreas and/or pancreatic cancer associated sequence. The third column, “Gene Name,” and the fourth column, “Overlap,” provide a putative identification of the gene based on the sequence similarity of its translation product to an amino acid sequence found in a publicly accessible gene database and the database accession no. for the database sequence having similarity, respectively. The fifth and sixth columns provide the location (nucleotide position nos. within the contig), “Start” and “End”, in the polynucleotide sequence “SEQ ID NO:X” that delineate the preferred ORF shown in the sequence listing as SEQ ID NO:Y. The seventh and eighth columns provide the “% Id” (percent identity) and “% Si” (percent similarity), respectively, observed between the aligned sequence segments of the translation product of SEQ ID NO:X and the database sequence. The ninth column provides a unique “Clone ID” for a cDNA clone related to each contig sequence.

[0015] Table 2 summarizes ATCC Deposits, Deposit dates, and ATCC designation numbers of deposits made with the ATCC in connection with the present application.

[0016] Table 3 indicates public ESTs, of which at least one, two, three, four, five, ten, fifteen or more of any one or more of these public EST sequences are optionally excluded from certain embodiments of the invention.

[0017] Table 4 lists residues comprising antigenic epitopes of antigenic epitope-bearing fragments present in most of the pancreas and/or pancreatic cancer associated polynucleotides described in Table 1 as predicted by the inventors using the algorithm of Jameson and Wolf, (1988) Comp. Appl. Biosci. 4:181-186. The Jameson-Wolf antigenic analysis was performed using the computer program PROTEAN (Version 3.11 for the Power Macintosh, DNASTAR, Inc., 1228 South Park Street Madison, Wis.). Pancreas and pancreatic cancer associated polypeptides (e.g., SEQ ID NO:Y, polypeptides encoded by SEQ ID NO:X, or polypeptides encoded by the cDNA in the referenced cDNA clone) may possess one or more antigenic epitopes comprising residues described in Table 4. It will be appreciated that depending on the analytical criteria used to predict antigenic determinants, the exact address of the determinant may vary slightly. The residues and locations shown in column two of Table 4 correspond to the amino acid sequences for most pancreas and/or pancreatic cancer associated polypeptide sequence shown in the Sequence Listing.

[0018] Table 5 shows the cDNA libraries sequenced, and ATCC designation numbers and vector information relating to these cDNA libraries.

[0019] Definitions

[0020] The following definitions are provided to facilitate understanding of certain terms used throughout this specification.

[0021] In the present invention, “isolated” refers to material removed from its original environment (e.g., the natural environment if it is naturally occurring), and thus is altered “by the hand of man” from its natural state. For example, an isolated polynucleotide could be part of a vector or a composition of matter, or could be contained within a cell, and still be “isolated” because that vector, composition of matter, or particular cell is not the original environment of the polynucleotide. The term “isolated” does not refer to genomic or cDNA libraries, whole cell total or mRNA preparations, genomic DNA preparations (including those separated by electrophoresis and transferred onto blots), sheared whole cell genomic DNA preparations or other compositions where the art demonstrates no distinguishing features of the polynucleotide/sequences of the present invention.

[0022] As used herein, a “polynucleotide” refers to a molecule having a nucleic acid sequence contained in SEQ ID NO:X (as described in column 1 of Table 1) or the related cDNA clone (as described in column 9 of Table 1 and contained within a library deposited with the ATCC). For example, the polynucleotide can contain the nucleotide sequence of the full length cDNA sequence, including the 5′ and 3′ untranslated sequences, the coding region, as well as fragments, epitopes, domains, and variants of the nucleic acid sequence. Moreover, as used herein, a “polypeptide” refers to a molecule having an amino acid sequence encoded by a polynucleotide of the invention as broadly defined (obviously excluding poly-Phenylalanine or poly-Lysine peptide sequences which result from translation of a polyA tail of a sequence corresponding to a cDNA).

[0023] In the present invention, “SEQ ID NO:X” was often generated by overlapping sequences contained in multiple clones (contig analysis). A representative clone containing all or most of the sequence for SEQ ID NO:X is deposited at Human Genome Sciences, Inc. (HGS) in a catalogued and archived library. As shown in column 9 of Table 1, each clone is identified by a cDNA Clone ID. Each Clone ID is unique to an individual clone and the Clone ID is all the information needed to retrieve a given clone from the HGS library. In addition to the individual cDNA clone deposits, most of the cDNA libraries from which the clones were derived were deposited at the American Type Culture Collection (hereinafter “ATCC”). Table 5 provides a list of the deposited cDNA libraries. One can use the Clone ID to determine the library source by reference to Tables 2 and 5. Table 5 lists the deposited cDNA libraries by name and links each library to an ATCC Deposit. Library names contain four characters, for example, “HTWE.” The name of a cDNA clone (“Clone ID”) isolated from that library begins with the same four characters, for example “HTWEP07”. As mentioned below, Table 1 correlates the Clone ID names with SEQ ID NOs. Thus, starting with a SEQ ID NO, one can use Tables 1, 2 and 5 to determine the corresponding Clone ID, from which library it came and in which ATCC deposit the library is contained. Furthermore, it is possible to retrieve a given cDNA clone from the source library by techniques known in the art and described elsewhere herein. The ATCC is located at 10801 University Boulevard, Manassas, Va. 20110-2209, USA. The ATCC deposits were made pursuant to the terms of the Budapest Treaty on the international recognition of the deposit of microorganisms for the purposes of patent procedure.

[0024] A “polynucleotide” of the present invention also includes those polynucleotides capable of hybridizing, under stringent hybridization conditions, to sequences contained in SEQ ID NO:X, or the complement thereof (e.g., the complement of any one, two, three, four, or more of the polynucleotide fragments described herein), and/or sequences contained in the related cDNA clone within a library deposited with the ATCC. “Stringent hybridization conditions” refers to an overnight incubation at 42 degree C. in a solution comprising 50% formamide, 5×SSC (750 mM NaCl, 75 mM trisodium citrate), 50 mM sodium phosphate (pH 7.6), 5×Denhardt's solution, 10% dextran sulfate, and 20 μg/ml denatured, sheared salmon sperm DNA, followed by washing the filters in 0.1×SSC at about 65 degree C.

[0025] Also included within “polynucleotides” of the present invention are nucleic acid molecules that hybridize to the polynucleotides of the present invention at lower stringency hybridization conditions. Changes in the stringency of hybridization and signal detection are primarily accomplished through the manipulation of formamide concentration (lower percentages of formamide result in lowered stringency); salt conditions, or temperature. For example, lower stringency conditions include an overnight incubation at 37 degree C. in a solution comprising 6×SSPE (20×SSPE=3M NaCl; 0.2M NaH₂PO₄; 0.02M EDTA, pH 7.4), 0.5% SDS, 30% formamide, 100 ug/ml salmon sperm blocking DNA; followed by washes at 50 degree C. with 1×SSPE, 0.1% SDS. In addition, to achieve even lower stringency, washes performed following stringent hybridization can be done at higher salt concentrations (e.g. 5×SSC).

[0026] Note that variations in the above conditions may be accomplished through the inclusion and/or substitution of alternate blocking reagents used to suppress background in hybridization experiments. Typical blocking reagents include Denhardt's reagent, BLOTTO, heparin, denatured salmon sperm DNA, and commercially available proprietary formulations. The inclusion of specific blocking reagents may require modification of the hybridization conditions described above, due to problems with compatibility.

[0027] Of course, a polynucleotide which hybridizes only to polyA+ sequences (such as any 3′ terminal polyA+ tract of a cDNA shown in the sequence listing), or to a complementary stretch of T (or U) residues, would not be included in the definition of “polynucleotide,” since such a polynucleotide would hybridize to any nucleic acid molecule containing a poly (A) stretch or the complement thereof (e.g., practically any double-stranded cDNA clone generated using oligo dT as a primer).

[0028] The polynucleotides of the present invention can be composed of any polyribonucleotide or polydeoxribonucleotide, which may be unmodified RNA or DNA or modified RNA or DNA. For example, polynucleotides can be composed of single- and double-stranded DNA, DNA that is a mixture of single- and double-stranded regions, single- and double-stranded RNA, and RNA that is mixture of single- and double-stranded regions, hybrid molecules comprising DNA and RNA that may be single-stranded or, more typically, double-stranded or a mixture of single- and double-stranded regions. In addition, the polynucleotide can be composed of triple-stranded regions comprising RNA or DNA or both RNA and DNA. A polynucleotide may also contain one or more modified bases or DNA or RNA backbones modified for stability or for other reasons. “Modified” bases include, for example, tritylated bases and unusual bases such as inosine. A variety of modifications can be made to DNA and RNA; thus, “polynucleotide” embraces chemically, enzymatically, or metabolically modified forms.

[0029] In specific embodiments, the polynucleotides of the invention are at least 15, at least 30, at least 50, at least 100, at least 125, at least 500, or at least 1000 continuous nucleotides but are less than or equal to 300 kb, 200 kb, 100 kb, 50 kb, 15 kb, 10 kb, 7.5 kb, 5 kb, 2.5 kb, 2.0 kb, or 1 kb, in length. In a further embodiment, polynucleotides of the invention comprise a portion of the coding sequences, as disclosed herein, but do not comprise all or a portion of any intron. In another embodiment, the polynucleotides comprising coding sequences do not contain coding sequences of a genomic flanking gene (i.e., 5′ or 3′ to the gene of interest in the genome). In other embodiments, the polynucleotides of the invention do not contain the coding sequence of more than 1000, 500, 250, 100, 50, 25, 20, 15, 10, 5, 4, 3, 2, or 1 genomic flanking gene(s).

[0030] “SEQ ID NO:X” refers to a pancreatic cancer antigen polynucleotide sequence described in Table 1. SEQ ID NO:X is identified by an integer specified in column 1 of Table 1. The polypeptide sequence SEQ ID NO:Y is a translated open reading frame (ORF) encoded by polynucleotide SEQ ID NO:X. There are 459 pancreatic cancer antigen polynucleotide sequences described in Table 1 and shown in the sequence listing (SEQ ID NO:1 through SEQ ID NO:459). Likewise there are 459 polypeptide sequences shown in the sequence listing, one polypeptide sequence for each of the polynucleotide sequences (SEQ ID NO:460 through SEQ ID NO:918). The polynucleotide sequences are shown in the sequence listing immediately followed by all of the polypeptide sequences. Thus, a polypeptide sequence corresponding to polynucleotide sequence SEQ ID NO:1 is the first polypeptide sequence shown in the sequence listing. The second polypeptide sequence corresponds to the polynucleotide sequence shown as SEQ ID NO:2, and so on. In otherwords, since there are 459 polynucleotide sequences, for any polynucleotide sequence SEQ ID NO:X, a corresponding polypeptide SEQ ID NO:Y can be determined by the formula X+459=Y. In addition, any of the unique “Sequence/Contig ID” defined in column 2 of Table 1, can be linked to the corresponding polypeptide SEQ ID NO:Y by reference to Table 4.

[0031] The polypeptides of the present invention can be composed of amino acids joined to each other by peptide bonds or modified peptide bonds, i.e., peptide isosteres, and may contain amino acids other than the 20 gene-encoded amino acids. The polypeptides may be modified by either natural processes, such as posttranslational processing, or by chemical modification techniques which are well known in the art. Such modifications are well described in basic texts and in more detailed monographs, as well as in a voluminous research literature. Modifications can occur anywhere in a polypeptide, including the peptide backbone, the amino acid side-chains and the amino or carboxyl termini. It will be appreciated that the same type of modification may be present in the same or varying degrees at several sites in a given polypeptide. Also, a given polypeptide may contain many types of modifications. Polypeptides may be branched, for example, as a result of ubiquitination, and they may be cyclic, with or without branching. Cyclic, branched, and branched cyclic polypeptides may result from posttranslation natural processes or may be made by synthetic methods. Modifications include acetylation, acylation, ADP-ribosylation, amidation, covalent attachment of flavin, covalent attachment of a heme moiety, covalent attachment of a nucleotide or nucleotide derivative, covalent attachment of a lipid or lipid derivative, covalent attachment of phosphotidylinositol, cross-linking, cyclization, disulfide bond formation, demethylation, formation of covalent cross-links, formation of cysteine, formation of pyroglutamate, formylation, gamma-carboxylation, glycosylation, GPI anchor formation, hydroxylation, iodination, methylation, myristoylation, oxidation, pegylation, proteolytic processing, phosphorylation, prenylation, racemization, selenoylation, sulfation, transfer-RNA mediated addition of amino acids to proteins such as arginylation, and ubiquitination. (See, for instance, PROTEINS—STRUCTURE AND MOLECULAR PROPERTIES, 2nd Ed., T. E. Creighton, W. H. Freeman and Company, New York (1993); POSTTRANSLATIONAL COVALENT MODIFICATION OF PROTEINS, B. C. Johnson, Ed., Academic Press, New York, pgs. 1-12 (1983); Seifter et al., Meth Enzymol 182:626-646 (1990); Rattan et al., Ann NY Acad Sci 663:48-62 (1992).)

[0032] The pancreas and pancreatic cancer polypeptides of the invention can be prepared in any suitable manner. Such polypeptides include isolated naturally occurring polypeptides, recombinantly produced polypeptides, synthetically produced polypeptides, or polypeptides produced by a combination of these methods. Means for preparing such polypeptides are well understood in the art.

[0033] The polypeptides may be in the form of the secreted protein, including the mature form, or may be a part of a larger protein, such as a fusion protein (see below). It is often advantageous to include an additional amino acid sequence which contains secretory or leader sequences, pro-sequences, sequences which aid in purification, such as multiple histidine residues, or an additional sequence for stability during recombinant production.

[0034] The pancreas and pancreatic cancer polypeptides of the present invention are preferably provided in an isolated form, and preferably are substantially purified. A recombinantly produced version of a polypeptide, including the secreted polypeptide, can be substantially purified using techniques described herein or otherwise known in the art, such as, for example, by the one-step method described in Smith and Johnson, Gene 67:31-40 (1988). Polypeptides of the invention also can be purified from natural, synthetic or recombinant sources using techniques described herein or otherwise known in the art, such as, for example, antibodies of the invention raised against the polypeptides of the present invention in methods which are well known in the art.

[0035] By a polypeptide demonstrating a “functional activity” is meant, a polypeptide capable of displaying one or more known functional activities associated with a full-length (complete) protein of the invention. Such functional activities include, but are not limited to, biological activity, antigenicity [ability to bind (or compete with a polypeptide for binding) to an anti-polypeptide antibody], immunogenicity (ability to generate antibody which binds to a specific polypeptide of the invention), ability to form multimers with polypeptides of the invention, and ability to bind to a receptor or ligand for a polypeptide.

[0036] “A polypeptide having functional activity” refers to polypeptides exhibiting activity similar, but not necessarily identical to, an activity of a polypeptide of the present invention, including mature forms, as measured in a particular assay, such as, for example, a biological assay, with or without dose dependency. In the case where dose dependency does exist, it need not be identical to that of the polypeptide, but rather substantially similar to the dose-dependence in a given activity as compared to the polypeptide of the present invention (i.e., the candidate polypeptide will exhibit greater activity or not more than about 25-fold less and, preferably, not more than about tenfold less activity, and most preferably, not more than about three-fold less activity relative to the polypeptide of the present invention).

[0037] The functional activity of the pancreatic cancer antigen polypeptides, and fragments, variants derivatives, and analogs thereof, can be assayed by various methods.

[0038] For example, in one embodiment where one is assaying for the ability to bind or compete with full-length polypeptide of the present invention for binding to an antibody to the full length polypeptide antibody, various immunoassays known in the art can be used, including but not limited to, competitive and non-competitive assay systems using techniques such as radioimmunoassays, ELISA (enzyme linked immunosorbent assay), “sandwich” immunoassays, immunoradiometric assays, gel diffusion precipitation reactions, immunodiffusion assays, in situ immunoassays (using colloidal gold, enzyme or radioisotope labels, for example), western blots, precipitation reactions, agglutination assays (e.g., gel agglutination assays, hemagglutination assays), complement fixation assays, immunofluorescence assays, protein A assays, and immunoelectrophoresis assays, etc. In one embodiment, antibody binding is detected by detecting a label on the primary antibody. In another embodiment, the primary antibody is detected by detecting binding of a secondary antibody or reagent to the primary antibody. In a further embodiment, the secondary antibody is labeled. Many means are known in the art for detecting binding in an immunoassay and are within the scope of the present invention.

[0039] In another embodiment, where a ligand is identified, or the ability of a polypeptide fragment, variant or derivative of the invention to multimerize is being evaluated, binding can be assayed, e.g., by means well-known in the art, such as, for example, reducing and non-reducing gel chromatography, protein affinity chromatography, and affinity blotting. See generally, Phizicky, E., et al., Microbiol. Rev. 59:94-123 (1995). In another embodiment, physiological correlates polypeptide of the present invention binding to its substrates (signal transduction) can be assayed.

[0040] In addition, assays described herein (see Examples) and otherwise known in the art may routinely be applied to measure the ability of polypeptides of the present invention and fragments, variants derivatives and analogs thereof to elicit polypeptide related biological activity (either in vitro or in vivo). Other methods will be known to the skilled artisan and are within the scope of the invention.

[0041] Pancreas and Pancreatic Cancer Associated Polynucleotides and Polypeptides of the Invention

[0042] It has been discovered herein that the polynucleotides described in Table 1 are expressed at significantly enhanced levels in human pancreas and/or pancreatic cancer tissues. Accordingly, such polynucleotides, polypeptides encoded by such polynucleotides, and antibodies specific for such polypeptides find use in the prediction, diagnosis, prevention and treatment of pancreas related disorders, including pancreatic cancer as more fully described below.

[0043] Table 1 summarizes some of the polynucleotides encompassed by the invention (including contig sequences (SEQ ID NO:X) and the related cDNA clones) and further summarizes certain characteristics of these pancreas and/or pancreatic cancer associated polynucleotides and the polypeptides encoded thereby.

TABLE 1

| Seq | | | | HGS | | | | |
|---|---|---|---|---|---|---|---|---|
| ID | Sequence/ | | | Nucleotide | | % | % | |
| No. | Contig ID | Gene Name | Overlap | Start | End | Id | Si | Clone ID |
| 1 | 456379 | | | 3 | 197 | | | HCDAJ28 |
| 2 | 462108 | 5′-AMP-activated protein kinase, gamma-1 subunit | gi\|1335856 | 2 | 1033 | 100 | 100 | HHPD186 |
| | | [Homo sapiens] >sp\|P54619\|AAKG_HUMAN 5′-AMP- | | | | | | |
| | | ACTIVATED PROTEIN KINASE, GAMMA-1 | | | | | | |
| | | SUBUNIT (AMPK GAMMA-1 CHAIN). Length = 331 | | | | | | |
| 3 | 503446 | | | 161 | 415 | | | HTTEU40 |
| 4 | 507841 | | | 1 | 159 | | | HOAAF52 |
| 5 | 509287 | Similarity to Yeast SOH-1 protein (SW:P38633) | gnl\|PID\|e1346272 | 1 | 480 | 66 | 80 | HMTME61 |
| | | [Caenorhabditis elegans] >sp\|P91869\|P91869 F32H2.2 | | | | | | |
| | | PROTEIN. Length = 163 | | | | | | |
| 6 | 509672 | | | 16 | 141 | | | HTPAM31 |
| 7 | 509673 | | | 1 | 162 | | | HMWBR61 |
| 8 | 518767 | | | 2 | 148 | | | HTPBZ88 |
| 9 | 522008 | | | 1 | 378 | | | HDPFM59 |
| 10 | 524112 | | | 248 | 475 | | | HJPCM86 |
| 11 | 525971 | clk2-136; putative [Homo sapiens] >pir\|S53638\|S53638 | gi\|632966 | 1 | 579 | 95 | 97 | HTXAR16 |
| | | protein kinase clk2-139 (EC 2.7.1.-) - human Length = | | | | | | |
| | | 139 | | | | | | |
| 12 | 527156 | ORFYOR262w [Saccharomyces cerevisiae] | gnl\|PID\|e252113 | 174 | 506 | 48 | 63 | HMWFW50 |
| | | >pir\|S67159\|S67159 probable membrane protein | | | | | | |
| | | YOR262w - yeast (Saccharomyces cerevisiae) | | | | | | |
| | | >sp\|Q08726\|Q08726 CHROMOSOME XV READING | | | | | | |
| | | FRAME ORF YOR262W.Length = 347 | | | | | | |
| 13 | 532502 | | | 73 | 267 | | | HTPCP39 |
| 14 | 533459 | electron transfer flavoprotein beta subunit [Homo | gi\|297902 | 2 | 850 | 87 | 87 | HKAAY56 |
| | | sapiens] >pir\|S32482\|S32482 electron transfer | | | | | | |
| | | flavoprotein beta chain - human | | | | | | |
| | | >sp\|P38117\|ETFB_HUMAN ELECTRON TRANSFER | | | | | | |
| | | FLAVOPROTEIN BETA-SUBUNIT (BETA-ETF). | | | | | | |
| | | Length = 255 | | | | | | |
| 15 | 533551 | interleukin 4 receptor [Homo sapiens] >gi\|3219334 | gi\|33834 | 2 | 1564 | 84 | 84 | HTOEV80 |
| | | (AC004525) Interleukin 4 alpha-chain precursor [Homo | | | | | | |
| | | sapiens] >sp\|P24394\|IL4R_HUMAN INTERLEUKIN-4 | | | | | | |
| | | RECEPTOR ALPHA CHAIN PRECURSOR (IL-4R- | | | | | | |
| | | ALPHA) (CD124 ANTIGEN). Length = 825 | | | | | | |
| 16 | 537850 | tetraspan membrane protein [Homo sapiens] | gi\|953239 | 179 | 913 | 89 | 89 | HLDQN04 |
| | | >sp\|P48230\|ILT4_HUMAN TETRASPAN | | | | | | |
| | | MEMBRANE PROTEIN IL-TMP.Length = 202 | | | | | | |
| 17 | 537925 | sialyltransferase [Homo sapiens] >pir\|A54898\|A54898 | gi\|522197 | 1 | 228 | 80 | 82 | HSKYV64 |
| | | gal-beta1,3galNAc alpha-2,3-sialyltransferase (EC | | | | | | |
| | | 2.4.99.-) - human Length = 340 | | | | | | |
| 18 | 538160 | pancreatic zymogen granule membrane protein GP-2 | gi\|1244512 | 68 | 595 | 98 | 98 | HPWAR18 |
| | | [Homo sapiens] >pir\|G02091\|G02091 pancreatic | | | | | | |
| | | zymogen granule membrane protein GP-2 - human | | | | | | |
| | | >sp\|P55259\|GP2_HUMAN PANCREATIC | | | | | | |
| | | SECRETORY GRANULE MEMBRANE MAJOR | | | | | | |
| | | GLYCOPROTEIN GP2 PRECURSOR (PANCREATIC | | | | | | |
| | | ZYMOGEN GRA | | | | | | |
| 19 | 540420 | Method: conceptual translation supplied by author; | gi\|1049231 | 48 | 338 | 68 | 77 | HTPBW19 |
| | | putative hybrid protein similar to HER V-H protease and | | | | | | |
| | | HERV-E integrase [Human endogenous retrovirus] | | | | | | |
| | | >sp\|Q68997\|Q68997 SIMILAR TO HERV-H | | | | | | |
| | | PROTEASE AND HERV-E INTEGRASE. >gi\|2587023 | | | | | | |
| | | (AF026246) HERV-E integ | | | | | | |
| 20 | 540802 | annexin III [Homo sapiens] >gi\|178697 1,2-cyclic- | gi\|410202 | 198 | 671 | 99 | 99 | HMEKG44 |
| | | inositol-phosphate phosphodiesterase [Homo sapiens] | | | | | | |
| | | >gi\|307115 lipocortin-IlI [Homo sapiens] | | | | | | |
| | | >pir\|A47658\|LUHU3 annexin III - human | | | | | | |
| | | >sp\|P12429\|ANX3_HUMAN ANNEXIN III | | | | | | |
| | | (LIPOCORTIN III) (PLACENTAL | | | | | | |
| | | ANTICOAGULANT | | | | | | |
| 21 | 540989 | lipase related protein 1 [Homo sapiens] | gi\|187230 | 29 | 343 | 98 | 98 | HPASD60 |
| | | >pir\|A43357\|A43357 pancreatic lipase-related protein 1 - | | | | | | |
| | | human >sp\|P54315\|LIP1_HUMAN PANCREATIC | | | | | | |
| | | LIPASE RELATED PROTEIN 1 PRECURSOR (EC | | | | | | |
| | | 3.1.1.3). Length = 467 | | | | | | |
| 22 | 540997 | lipase related protein 1 [Homo sapiens] | gi\|187230 | 2 | 409 | 98 | 99 | HPASG94 |
| | | >pir\|A43357\|A43357 pancreatic lipase-related protein 1- | | | | | | |
| | | human >sp\|P54315\|LIP1_HUMAN PANCREATIC | | | | | | |
| | | LIPASE RELATED PROTEIN 1 PRECURSOR (EC | | | | | | |
| | | 3.1.1.3). Length = 467 | | | | | | |
| 23 | 548735 | P69 2-5A synthase II - human Length = 727 | pir\|B42665\|B42665 | 101 | 664 | 96 | 98 | HMTAE33 |
| 24 | 549709 | cytochrome P450 PCN3 [Homo sapiens] | gi\|81346 | 72 | 305 | 64 | 64 | HISBZ89 |
| | | >pir\|A34101\|A34101 cytochrome P450 3A5 - human | | | | | | |
| | | >sp\|P20815\|CP35_HUMAN CYTOCHROME P450 | | | | | | |
| | | 3A5 (EC 1.14.14.1) (CYPIIIA5) (P450-PCN3). | | | | | | |
| | | >gi\|950342 cytochrome P450 [Homo sapiens] {SUB 1- | | | | | | |
| | | 24} Length = 502 | | | | | | |
| 25 | 550007 | thimet oligopeptidase [Homo sapiens] >gi\|1030055 | gi\|1098600 | 150 | 782 | 100 | 100 | HCE1B78 |
| | | metalloproteinase [Homo sapiens] | | | | | | |
| | | >pir\|JC4197\|HYHUTH thimet oligopeptidase (EC | | | | | | |
| | | 3.4.24.15) - human >sp\|P52888\|MEPD_HUMAN | | | | | | |
| | | THIMET OLIGOPEPTIDASE (EC 3.4.24.15) | | | | | | |
| | | (ENDOPEPTIDASE 24.15) (MP78). {SUB 2-689} | | | | | | |
| | | Length = | | | | | | |
| 26 | 550118 | macrophage capping protein [Homo sapiens] | gi\|187456 | 1 | 1113 | 99 | 99 | HDPXJ18 |
| | | >pir\|A43358\|A43358 macrophage capping protein - | | | | | | |
| | | human >sp\|P40121\|CAPG_HUMAN MACROPHAGE | | | | | | |
| | | CAPPING PROTEIN (ACTIN-REGULATORY | | | | | | |
| | | PROTEIN CAP-G). >gi\|15505 Cap-G [Homo sapiens] | | | | | | |
| | | {SUB 1-172} Length = 348 | | | | | | |
| 27 | 550148 | | | 274 | 456 | | | HISBA17 |
| 28 | 550870 | carbonic anhydrase IV [Homo sapiens] | gi\|179791 | 1 | 594 | 94 | 94 | HNFIA35 |
| | | >pir\|A45745\|CRHU4 carbonate dehydratase (EC | | | | | | |
| | | 4.2.1.1) IV precursor - human | | | | | | |
| | | >sp\|P22748\|CAH4_HUMAN CARBONIC | | | | | | |
| | | ANHYDRASE IV PRECURSOR (EC 4.2.1.1) | | | | | | |
| | | (CARBONATE DEHYDRATASE IV). Length = 312 | | | | | | |
| 29 | 552506 | preproglucagon [Homo sapiens] >pir\|A24377\|GCHU | gi\|183270 | 3 | 350 | 96 | 96 | HTPDP78 |
| | | glucagon precursor - human | | | | | | |
| | | >sp\|P01275\|GLUC_HUMAN GLUCAGON | | | | | | |
| | | PRECURSOR. >gi\|31778 Human gene encoding | | | | | | |
| | | preproglucagon. Glucagon is a 29-amino acid pancreatic | | | | | | |
| | | hormone which counteracts the blood glucose-lowering | | | | | | |
| | | a | | | | | | |
| 30 | 553765 | complement factor B [Homo sapiens] | gi\|297569 | 48 | 1214 | 100 | 100 | HLDRK20 |
| | | >pir\|S34075\|BBHU complement factor B precursor - | | | | | | |
| | | human >sp\|P00751\|CFAB_HUMAN COMPLEMENT | | | | | | |
| | | FACTOR B PRECURSOR (EC 3.4.21.47) (C3/C5 | | | | | | |
| | | CONVERTASE) (PROPERDIN FACTOR B) | | | | | | |
| | | (GLYCINE-RICH BETA GLYCOPROTEIN) (GBG) | | | | | | |
| | | (PBF2). >gi\|758090 | | | | | | |
| 31 | 554050 | histidyl-tRNA synthetase [Homo sapiens] | gi\|32460 | 374 | 934 | 86 | 86 | HARME85 |
| | | >pir\|I37559\|SYHUHT histidine--tRNA ligase (EC | | | | | | |
| | | 6.1.1.21) - human >gi\|431312 histidyl tRNA synthetase | | | | | | |
| | | [Homo sapiens] {SUB 1-30} Length = 509 | | | | | | |
| 32 | 554186 | brain glycogen phosphorylase [Homo sapiens] | gi\|307200 | 2 | 814 | 98 | 99 | HKACY69 |
| | | >pir\|A29949\|A29949 glycogen phosphorylase (EC | | | | | | |
| | | 2.4.1.1), brain (astrocytoma cell line) - human Length = | | | | | | |
| | | 863 | | | | | | |
| 33 | 554716 | transcobalainin I precursor [Homo sapiens] | gi\|307479 | 1 | 441 | 97 | 97 | HCHAC67 |
| | | >pir\|A34227\|A34227 transcobalainin I precursor - | | | | | | |
| | | human Length = 433 | | | | | | |
| 34 | 556791 | integrin alpha 1 subunit - human (fragment) | pir\|A45226\|A45226 | 2 | 484 | 93 | 93 | HFIYR48 |
| | | >sp\|P56199\|ITA1_HUMAN INTEGRIN ALPHA-1 | | | | | | |
| | | (LAMININ AND COLLAGEN RECEPTOR) (VLA-1) | | | | | | |
| | | (CD49A). Length = 1151 | | | | | | |
| 35 | 557121 | gamma-glutmyl transpeptidase-related protein [Homo | gi\|183142 | 151 | 567 | 100 | 100 | HISCL81 |
| | | sapiens] >pir\|A41125\|A41125 gamma- | | | | | | |
| | | glutamyltransferase (EC 2.3.2.2) related protein - human | | | | | | |
| | | >sp\|P36269\|GGT5_HUMAN GAMMA- | | | | | | |
| | | GLUTAMYLTRANSPEPTIDASE 5 PRECURSOR (EC | | | | | | |
| | | 2.3.2.2) (GAMMA- GLUTAMYLTRANSFERASE 5) | | | | | | |
| | | (GGT-R | | | | | | |
| 36 | 557199 | 180 kDa bullous pemphigoid antigen 2/type XVII | gi}1877435 | 2 | 646 | 81 | 81 | HPDDA57 |
| | | collagen [Homo sapiens] >sp\|E307563\|E307563 180 | | | | | | |
| | | KDA BULLOUS PEMPHIGOID ANTIGEN 2/TYPE | | | | | | |
| | | XVII COLLAGEN. >sp\|G1877435\|G1877435 180 KDA | | | | | | |
| | | BULLOUS PEMPHIGOID ANTIGEN 2/TYPE XVII | | | | | | |
| | | COLLAGEN. Length = 1497 | | | | | | |
| 37 | 557293 | alpha-S type IV collagen [Homo sapiens] >gi\|180825 | gi\|1314210 | 3 | 929 | 99 | 99 | HISBT90 |
| | | collagen type IV alpha 5 chaln [Homo sapiens] {SUB | | | | | | |
| | | 833-1604} Length = 1604 | | | | | | |
| 38 | 557441 | neurofibromin [Rattus norvegicus] >pir\|JC5196\|JC5196 | gnl\|PID\|d1008732 | 207 | 326 | 100 | 100 | HTPAD51 |
| | | neurofibromin I - rat >sp\|P97526\|P97526 | | | | | | |
| | | NEUROFIBROMIN. >gi\|309451 neurofibromin [Mus | | | | | | |
| | | musculus] {SUB 1-96} >gi\|1084091 neurofibromatosis | | | | | | |
| | | 1 [Homo sapiens] {SUB 97-161} >gi\|1084092 | | | | | | |
| | | neurofibromatosis 1 [Hom | | | | | | |
| 39 | 558091 | flavin-containing monooxygenase 5 [Homo sapiens] | gi\|559046 | 803 | 1066 | 98 | 98 | HE9GG94 |
| | | >pir\|S71618\|S71618 dimethylaniline monooxygenase | | | | | | |
| | | (N-oxide-forming) (EC 1.14.13.8) FMO5 - human | | | | | | |
| | | >sp\|P49326\|FMO5_HUMAN DIMETHYLANILINE | | | | | | |
| | | MONOOXYGENASE [N-OXIDE FORMING] 5 (EC | | | | | | |
| | | 1.14.13.8) (HEPATIC FLAVIN-CONTAINI | | | | | | |
| 40 | 558423 | translin [Homo sapiens] >pir\|S51738\|S51738 translin - | gi\|607130 | 49 | 807 | 93 | 93 | HDTDF09 |
| | | human >sp\|Q15631\|Q15631 TRANSLIN. | | | | | | |
| | | >gnl\|PID\|e313773 MTRANCDS [Homo sapiens] {SUB | | | | | | |
| | | 23-215} Length = 228 | | | | | | |
| 41 | 558465 | G/T mismatch-specific thymine DNA glycosylase | gi\|1378107 | 1 | 507 | 90 | 91 | HAMFJ55 |
| | | [Homo sapiens] Length = 410 | | | | | | |
| 42 | 558493 | tubulin beta-1 chain - slime mold (Physarum | pir\|S02532\|502532 | 1 | 357 | 76 | 86 | HTTEJ40 |
| | | polycephalum) (fragment) >gi\|313801 beta-tubulin | | | | | | |
| | | [Physarum polycephalum[ {SUB 1-203} Length = 204 | | | | | | |
| 43 | 558778 | T-cell antigen receptor (AA 1 - 292) [Homo sapiens] | gi\|37004 | 290 | 625 | 95 | 95 | HISBP61 |
| | | >pir\|S03421\|S03421 T-cell receptor delta chain | | | | | | |
| | | precursor (Peer) - human Length = 292 | | | | | | |
| 44 | 558818 | tRNA-Guanine Transglycosylase [Homo sapiens] | gi\|940182 | 1 | 468 | 100 | 100 | HPIBT63 |
| | | >pir\|G01932\|G01932 tRNA-Guanine Transglycosylase - | | | | | | |
| | | human Length = 494 | | | | | | |
| 45 | 563182 | (AF072128) claudin-2 [Mus musculus] | gi\|3335184 | 2 | 466 | 81 | 85 | HCHMQ60 |
| | | >sp\|O88552\|O88552 CLAUDIN-2. Length = 230 | | | | | | |
| 46 | 572571 | | | 194 | 553 | | | HAICW02 |
| 47 | 575525 | Bat2 [Homo sapiens] >pir\|S37671\|S37671 bat2 protein - | gi\|29375 | 553 | 858 | 85 | 87 | HAPOJ89 |
| | | human Length = 1870 | | | | | | |
| 48 | 580659 | | | 695 | 1003 | | | HBICR03 |
| 49 | 583650 | islet regenerating protein [Homo sapiens] | gi\|190979 | 261 | 413 | 78 | 83 | HTPDS26 |
| | | >pir\|A35197\|RGHU1A regenerating islet lectin 1-alpha | | | | | | |
| | | precursor - human >sp\|P05451\|LITA_HUMAN | | | | | | |
| | | LITHOSTATHINE 1 ALPHA PRECURSOR | | | | | | |
| | | (PANCREATIC STONE PROTEIN) (PSP) | | | | | | |
| | | (PANCREATIC THREAD PROTEIN) (PTP) (ISLET | | | | | | |
| | | OF LANGERHANS | | | | | | |
| 50 | 584698 | | | 982 | 1200 | | | HLQCJ79 |
| 51 | 585791 | B61 [Homo sapiens] >pir\|A36377\|A36377 B61 protein | gi\|179321 | 52 | 705 | 95 | 95 | HSIDT08 |
| | | precursor - human >sp\|P20827\|EFA1_HUMAN | | | | | | |
| | | EPHRIN-A1 PRECURSOR (EPH-RELATED | | | | | | |
| | | RECEPTOR TYROSINE KINASE LIGAND 1) (LERK- | | | | | | |
| | | 1) (IMMEDIATE EARLY RESPONSE PROTEIN B61) | | | | | | |
| | | (TUMOR NECROSIS FACTOR, ALPHA-INDUCED | | | | | | |
| | | PROTEIN 4). | | | | | | |
| 52 | 587229 | phospholipase (Homo sapiens] >gi\|387025 | gi\|190013 | 3 | 470 | 81 | 81 | HPDDF22 |
| | | phospholipase [Homo sapiens] >gi\|2769697 | | | | | | |
| | | (AC003982) Phosphatidyicholine 2-acyihydrolase | | | | | | |
| | | [Homo sapiens] >pir\|C25793\|PSHU phospholipase A2 | | | | | | |
| | | (EC 3.1.1.4) precursor, pancreatic - human | | | | | | |
| | | >sp\|P04054\|PA21_HUMAN PHOSPHOLIPASE | | | | | | |
| 53 | 587246 | probable transmembrane protein TMC - human Length = | pir\|S70029\|S70029 | 67 | 573 | 92 | 92 | HLWAE93 |
| | | 705 | | | | | | |
| 54 | 587486 | alpha-subunit of prolyl 4-hydroxylase [Homo sapiens] | gi\|602675 | 745 | 1734 | 95 | 95 | HDPWQ32 |
| | | >pir\|I37173\|DAHUA2 procollagen-proline dioxygenase | | | | | | |
| | | (BC 1.14.11.2) alpha chain precursor, splice form 2 - | | | | | | |
| | | human >sp\|P13674\|P4HA_HUMAN PROLYL 4- | | | | | | |
| | | HYDROXYLASE ALPHA SUBUNIT PRECURSOR | | | | | | |
| | | (BC 1.14.11.2).Length = | | | | | | |
| 55 | 589218 | | | 6 | 185 | | | HBSAL59 |
| 56 | 592154 | adenylyl cyclase [Homo sapiens] >gi\|395275 adenylate | gi\|763444 | 101 | 1033 | 95 | 95 | HAOAE42 |
| | | cyclase [Homo sapiens] >pir\|I37136\|I37136 adenylate | | | | | | |
| | | cyclase (EC 4.6.1.1) - human (fragment) | | | | | | |
| | | >sp\|Q08462\|CYA2_HUMAN ADENYLATE | | | | | | |
| | | CYCLASE, TYPE II (EC 4.6.1.1) (ATP | | | | | | |
| | | PYROPHOSPHATE-LYASE) (ADENYLYL | | | | | | |
| | | CYCLASE) (FR | | | | | | |
| 57 | 598664 | unnamed protein product [unidentified] >gi\|35330 | gnl\|PID\|e307065 | 1 | 255 | 97 | 97 | HTPDO06 |
| | | carboxypeptidase a [Homo sapiens] >pir\|S29127\|S29127 | | | | | | |
| | | carboxypeptidase A (EC 3.4.17.1) CPA1 precursor - | | | | | | |
| | | human >sp\|P15085\|CBP1_HUMAN | | | | | | |
| | | CARBOXYPEPTIDASE A1 PRECURSOR (EC | | | | | | |
| | | 3.4.17.1). Length = 419 | | | | | | |
| 58 | 598665 | unnamed protein product [unidentified] >gi\|35330 | gnl\|PID\|e307065 | 1 | 1218 | 100 | 100 | HTPEE79 |
| | | carboxypeptidase a [Homo sapiens] >pir\|S29127\|S29127 | | | | | | |
| | | carboxypeptidase A (EC 3.4.17.1) CPA1 precursor - | | | | | | |
| | | human >sp\|P15085\|CBP1_HUMAN | | | | | | |
| | | CARBOXYPEPTIDASE A1 PRECURSOR (EC | | | | | | |
| | | 3.4.17.1). Length = 419 | | | | | | |
| 59 | 604719 | ADP-ribosylation factor [Bos taurus] >gi\|178156 ADP- | gi\|162627 | 1 | 651 | 100 | 100 | HSHCL62 |
| | | ribosylation factor 1 [Homo sapiens] >gi\|178164 ADP- | | | | | | |
| | | ribosylation factor 1 [Homo sapiens] | | | | | | |
| 60 | 612689 | | | 243 | 578 | | | HMADQ02 |
| 61 | 612980 | | | 47 | 259 | | | HISAD74 |
| 62 | 615134 | metavinculin - pig (fragments) >gi\|2283 metavinculin | pir\|S29507\|S29507 | 30 | 578 | 100 | 100 | HAHEM2O |
| | | [Sus scrofa] {SUB 113-336} Length = 336 | | | | | | |
| 63 | 616064 | | | 159 | 398 | | | HASCD63 |
| 64 | 616096 | (AC004877) sco-spondin-mucin-like; similar to P98167 | gi\|3638957 | 99 | 221 | 40 | 52 | HOHCQ05 |
| | | (PID:g1711548); details of intron/exon structure | | | | | | |
| | | uncertain [Homo sapiens] >sp\|O75851\|O75851 | | | | | | |
| | | WUGSC:H_DJ0751H13.1 PROTEIN (FRAGMENT). | | | | | | |
| | | Length = 4123 | | | | | | |
| 65 | 616926 | Gps2 [Homo sapiens] Length = 327 | gi\|1049070 | 2 | 1123 | 100 | 100 | HDPJK81 |
| 66 | 634923 | islet regenerating protein [Homo sapiens] | gi\|190979 | 148 | 447 | 81 | 88 | HTPBT17 |
| | | >pir\|A35197\|RGHU1A regenerating islet lectin 1-alpha | | | | | | |
| | | precursor - human >sp\|P05451\|LITA_HUMAN | | | | | | |
| | | LITHOSTATHINE 1 ALPHA PRECURSOR | | | | | | |
| | | (PANCREATIC STONE PROTEIN) (PSP) | | | | | | |
| | | (PANCREATIC THREAD PROTEIN) (PTP) (ISLET | | | | | | |
| | | OF LANGERHANS | | | | | | |
| 67 | 646688 | ORFI [Homo sapiens] >sp\|Q14921\|Q14921 | gi\|189086 | 508 | 819 | 99 | 99 | HTPDY03 |
| | | NONSPECIFIC CROSSREACTING ANTIGEN. | | | | | | |
| | | Length = 100 | | | | | | |
| 68 | 647531 | calcium-dependent protease [Oryctolagus cuniculus] | gi\|165666 | 809 | 1177 | 76 | 81 | HMSCC36 |
| | | >pir\|B24815\|B24815 calpain (EC 3.4.22.17) large chain | | | | | | |
| | | 2 - rabbit (fragment) >sp\|P06814\|CAN2_RABIT | | | | | | |
| | | CALPAIN 2, LARGE [CATALYTIC] SUBUNIT (EC | | | | | | |
| | | 3.4.22.17) (CALCIUM-ACTIVATED NEUTRAL | | | | | | |
| | | PROTEINASE) (CANP) (M-TYPE) | | | | | | |
| 69 | 647695 | preprocarboxypeptidase A2 [Homo sapiens] | gi\|790227 | 2 | 1285 | 92 | 92 | HVAAB38 |
| | | >pir\|A56171\|A56171 carboxypeptidase A2 (EC | | | | | | |
| | | 3.4.17.15) precursor - human | | | | | | |
| | | >sp\|P48052\|CPA2_HUMAN CARBOXYPEPTIDASE | | | | | | |
| | | A2 PRECURSOR (BC 3.4.17.15). Length = 417 | | | | | | |
| 70 | 647699 | chymotrypsin-like protease CTRL-1 [Homo sapiens] | gi\|438039 | 2 | 577 | 100 | 100 | HCCMB81 |
| | | >gi\|406228 chymotrypsin-like protease CTRL-1 [Homo | | | | | | |
| | | sapiens] >pir\|I38136}I38136 chymotrypsin-like | | | | | | |
| | | proteinase (BC 3.4.21.-) CTRL-1 - human | | | | | | |
| | | >sp\|P40313\|CTRL_HUMAN CHYMOTRYPSIN-LIKE | | | | | | |
| | | PROTEASE CTRL-1 PRECURSOR (EC | | | | | | |
| 71 | 651706 | erythrocyte p55 [Homo sapiens] | gi\|189786 | 1 | 963 | 96 | 97 | HTHCO11 |
| | | >sp\|Q00013\|EM55_HUMAN 55 KD ERYTHROCYTE | | | | | | |
| | | MEMBRANE PROTEIN (P55). Length = 466 | | | | | | |
| 72 | 651726 | arylacetamide deacetylase [Homo sapiens] | gi\|537514 | 384 | 1553 | 99 | 99 | HFVHL70 |
| | | >pir\|A53856\|A53856 aryl-acylamidase (EC 3.5.1.13) - | | | | | | |
| | | human >sp\|P22760\|AAAD_HUMAN | | | | | | |
| | | ARYLACETAMIDE DEACETYLASE (EC 3.1.1.-) | | | | | | |
| | | (AADAC). {SUB 2-399} Length = 399 | | | | | | |
| 73 | 652160 | alpha 2-macroglobulin 690-730 [Homo sapiens] | gi\|579592 | 78 | 860 | 92 | 92 | HDPUB04 |
| | | Length =1474 | | | | | | |
| 74 | 654015 | | | 172 | 390 | | | HISAV29 |
| 75 | 656339 | alpha endosulfine [Homo sapiens] >sp\|O43768\|O43768 | gnl\|PID\|e284090 | 1 | 450 | 100 | 100 | HKGCM36 |
| | | ALPHA ENDOSULFINE. >gnl\|PID\|e224652 alpha | | | | | | |
| | | endosulfine [Bos taurus] {SUB 25-101] Length = 121 | | | | | | |
| 76 | 657190 | | | 293 | 493 | | | HLTH143 |
| 77 | 657859 | | | 3 | 323 | | | HNKAA14 |
| 78 | 662143 | | | 576 | 722 | | | HLDQI35 |
| 79 | 662212 | FK506 polyketide synthase [Streptomyces sp.] | gnl\|PID\|e290681 | 11 | 457 | 45 | 59 | HTPAG88 |
| | | >sp\|P95814\|P95814 FK506 POLYKETIDE | | | | | | |
| | | SYNTHASE. Length = 6420 | | | | | | |
| 80 | 662225 | | | 107 | 289 | | | HWACN48 |
| 81 | 662496 | | | 3 | 446 | | | HWHHG17 |
| 82 | 669529 | | | 254 | 343 | | | HISBT20 |
| 83 | 670453 | acid sphingomyelinase [Homo sapiens] | gi\|972769 | 926 | 1648 | 100 | 100 | HMAJQ46 |
| | | >sp\|Q16837\|Q16837 ACID SPHINGOMYELINASE | | | | | | |
| | | (EC 3.1.4.12) (SPHINGOMYELIN | | | | | | |
| | | PHOSPHODIESTERASE) (NEUTRAL | | | | | | |
| | | SPHINGOMYELINASE). >gi\|972770 acid | | | | | | |
| | | sphingomyelinase [Homo sapiens] {SUB 33-629} | | | | | | |
| | | Length = 629 | | | | | | |
| 84 | 675028 | seven in absentia homolog [Homo sapiens] >gi\|2673966 | gi\|3041825 | 18 | 284 | 100 | 100 | HE2IJ09 |
| | | hSIAH1 [Homo sapiens] >sp\|O43269\|O43269 HSIAH1. | | | | | | |
| | | Length = 282 | | | | | | |
| 85 | 681325 | | | 3 | 224 | | | HAJBC26 |
| 86 | 683103 | | | 212 | 1024 | | | HTTBN65 |
| 87 | 684432 | serine hydroxymethyltransferase [Homo sapiens] | gi\|438636 | 3 | 905 | 94 | 95 | HSPAA79 |
| | | >gi\|307422 serine hydroxymethyltransferase [Homo | | | | | | |
| | | sapiens] >pir\|A46746\|A46746 glycine | | | | | | |
| | | hydroxymethyltransferase (EC 2.1.2.1), cytosolic - | | | | | | |
| | | human >sp\|P34896\|GLYC_HUMAN SERINE | | | | | | |
| | | HYDROXYMETHYLTRANSFERASE, CYTOSOLIC ( | | | | | | |
| 88 | 688018 | protease (put.); putative [Simian immunodeficiency | gi\|334735 | 169 | 351 | 66 | 77 | HTPDE05 |
| | | virus] >sp\|Q85727\|Q85727 PIGTAILED MONKEY | | | | | | |
| | | SIMIAN T-CELL LEUKEMIA VIRUS PROTEASE | | | | | | |
| | | (FRAGMENT). Length = 215 | | | | | | |
| 89 | 688077 | (AF047440) ribosomal protein L33-like protein [Homo | gi\|3335136 | 1 | 276 | 100 | 100 | HEBAG86 |
| | | sapiens] >sp\|O75394\|O75394 | RIBOSOMAL PROTEIN | | | | | |
| | | L33-LIKE PROTEIN. Length = 65 | | | | | | |
| 90 | 691522 | similar to vacuolar biogenesis protein (pep5); cDNA | gnl\|PID\|e1351725 | 1 | 1179 | 32 | 54 | HTACN89 |
| | | EST EMBL:D27614 comes from this gene; cDNA EST | | | | | | |
| | | EMBL:D34974 comes from this gene [Caenorhabditis | | | | | | |
| | | elegans] >gnl\|PID\|e1351725 similar to vacuolar | | | | | | |
| | | biogenesis protein (pep5); cDNA EST EMBL:D27614 | | | | | | |
| | | comes from t | | | | | | |
| 91 | 693706 | transcription factor ISGF-3 [Homo sapiens] | gi\|2281071 | 184 | 2541 | 98 | 98 | HAICK36 |
| | | >sp\|G2281071\|G2281071 TRANSCRIPTION FACTOR | | | | | | |
| | | ISGF-3. >sp\|G1168081\|G1168081 SIGNAL | | | | | | |
| | | TRANSDUCER AND ACTIVATOR OF | | | | | | |
| | | TRANSCRIPTION 1A, STAT1A=INTERLEUKIN-6 | | | | | | |
| | | RESPONSE ELEMENT BINDING PROTEIN {SRC- | | | | | | |
| | | HOMOLOGY DOMAIN TYPE 2}. {S | | | | | | |
| 92 | 694523 | | | 1 | 204 | | | HTPDK30 |
| 93 | 697517 | PHOSPHOGLUCOMUTASE (BC 5.4.2.2) (GLUCOSE | sp\|P36871\|PGMU_HU | 117 | 1649 | 91 | 91 | HJBDL34 |
| | | PHOSPHOMUTASE) (PGM). Length = 561 | MAN | | | | | |
| 94 | 699054 | | | 338 | 889 | | | HMECT29 |
| 95 | 699464 | | | 2 | 241 | | | HTLDA59 |
| 96 | 703402 | (AF000422) TTF-I interacting peptide 5 [Homo sapiens] | gi\|2183083 | 1 | 423 | 94 | 95 | HHFHV36 |
| | | >sp\|O00536\|O00536 TTF-I INTERACTING PEPTIDE | | | | | | |
| | | 5 (FRAGMENT). Length = 407 | | | | | | |
| 97 | 703651 | guanine nucleotide-binding protein alpha subunit, G | pir\|A48071\|A48071 | 3 | 332 | 99 | 99 | HDPGN16 |
| | | alpha 12 - human >sp\|G264227\|G264227 GUANINE | | | | | | |
| | | NUCLEOTIDE-BINDING PROTEIN ALPHA | | | | | | |
| | | SUBUNIT, G ALPHA 12. Length = 381 | | | | | | |
| 98 | 704905 | | | 359 | 655 | | | HPMFK19 |
| 99 | 706907 | | | 1 | 153 | | | HRSAR67 |
| 100 | 708515 | CDM [Homo sapiens] >gi\|535058 tumor-associated | gi\|479157 | 1 | 480 | 87 | 87 | HCFDA53 |
| | | antigen [Homo sapiens] >gi\|1508820 CDM protein | | | | | | |
| | | [Homo sapiens] >pir\|S44279\|S44279 CDM protein - | | | | | | |
| | | human >sp\|P51572\|CDM_HUMAN CDM PROTEIN | | | | | | |
| | | (6C6-AG TUMOR-ASSOCIATED ANTIGEN) | | | | | | |
| | | (DXS1357E). >gi\|1020320 CDM protein [Hom | | | | | | |
| 101 | 710572 | | | 6 | 248 | | | HHASC40 |
| 102 | 710618 | | | 125 | 325 | | | HBMAC72 |
| 103 | 711810 | | | 283 | 543 | | | HBXCZ83 |
| 104 | 714933 | RNA adenosine deaminase [Homo sapiens] | gi\|2795790 | 2 | 370 | 89 | 90 | HAMFQ09 |
| | | >sp\|O43859\|O43859 RNA ADENOSINE | | | | | | |
| | | DEAMINASE. Length = 1181 | | | | | | |
| 105 | 716331 | (AF006621) embryonic lung protein [Homo sapiens] | gi\|2654559 | 1 | 564 | 91 | 91 | HLTHP10 |
| | | >sp\|G2654559\|G2654559 EMBRYONIC LUNG | | | | | | |
| | | PROTEIN. Length = 568 | | | | | | |
| 106 | 717686 | | | 282 | 494 | | | HTPBX62 |
| 107 | 718187 | | | 1 | 153 | | | HTPDG49 |
| 108 | 719934 | triglyceride lipase precursor [Homo sapiens] >gi\|190140 | gi\|339597 | 2 | 1420 | 100 | 100 | HPASD23 |
| | | lipase [Homo sapiens] >gi\|1304379 pancreatic lipase | | | | | | |
| | | [Homo sapiens] >pir\|C43357\|C43357 triacylglycerol | | | | | | |
| | | lipase (EC 3.1.1.3) precursor, pancreatic - human | | | | | | |
| | | >sp\|P16233\|LIPP_HUMAN TRIACYLGLYCEROL | | | | | | |
| | | LIPASE PR | | | | | | |
| 109 | 722980 | plasma gelsolin precursor [Sus scrofa] >gi\|758306 | gi\|164472 | 67 | 375 | 100 | 100 | HLQCT60 |
| | | gelsolin [Sus scrofa] >pir\|S02665\|S02665 gelsolin | | | | | | |
| | | precursor - pig (fragment) >sp\|P20305\|GELS_PIG | | | | | | |
| | | GELSOLIN PRECURSOR, PLASMA (ACTIN- | | | | | | |
| | | DEPOLYMERIZING FACTOR) (ADF) (BREVIN) | | | | | | |
| | | (FRAGMENT). Length = 772 | | | | | | |
| 110 | 723596 | poly(A) binding protein [Mus musculus] | gi\|53754 | 1010 | 1225 | 61 | 67 | HTTDR30 |
| | | >pir\|I48718\|I48718 poly(A) binding protein - mouse | | | | | | |
| | | >sp\|P29341\|PAB1_MOUSE POLYADENYLATE- | | | | | | |
| | | BINDING PROTEIN 1 (POLY(A) BINDING | | | | | | |
| | | PROTEIN 1) (PABP 1). Length = 636 | | | | | | |
| 111 | 724352 | | | 255 | 662 | | | HKGBC30 |
| 112 | 724450 | | | 311 | 547 | | | HMWGX50 |
| 113 | 724855 | | | 3 | 440 | | | HJPBC80 |
| 114 | 724904 | (AJ225089) 2′-5′ oligoadenylate synthetase (p59OAS) | gnl\|PID\|e1316607 | 1 | 417 | 100 | 100 | HT3TB04 |
| | | [Homo sapiens] >sp\|O75686\|O75686 2′-5′ | | | | | | |
| | | OLIGOADENYLATE SYNTHETASE (P59OAS). | | | | | | |
| | | Length = 514 | | | | | | |
| 115 | 725642 | synaptotagmin VI [Rattus norvegicus] | gi\|643654 | 1 | 303 | 85 | 86 | HISBX52 |
| | | >pir\|S58399\|S58399 cellutagmin I sytVl - rat | | | | | | |
| | | >sp\|Q62746\|Q62746 SYNAPTOTAGMIN VI. Length = | | | | | | |
| | | 511 | | | | | | |
| 116 | 726192 | Highly similar to murine eps 15 GB A.N. L221768 | gi\|470035 | 276 | 785 | 79 | 79 | HSKXH03 |
| | | [Homo sapiens] >pir\|S43074\|S43074 AF-1p protein - | | | | | | |
| | | human Length = 896 | | | | | | |
| 117 | 726964 | elastase 2 precursor [Homo sapiens] >gi\|182058 | gi\|182023 | 2 | 808 | 92 | 92 | HPASF77 |
| | | pancreatic elastase IIA zymogen [Homo sapiens] | | | | | | |
| | | >pir\|B26823\|B26823 pancreatic elastase II (BC | | | | | | |
| | | 3.4.21.71) A precursor - human | | | | | | |
| | | >sp\|P08217\|EL2A_HUMAN ELASTASE 2A | | | | | | |
| | | PRECURSOR (EC 3.4.21.71). Length = 269 | | | | | | |
| 118 | 730930 | glutathione synthetase [Homo sapiens] >gi\|1236350 | gi\|886284 | 22 | 1530 | 97 | 97 | HLWBL10 |
| | | glutathione synthetase [Homo sapiens] | | | | | | |
| | | >pir\|S56748\|S56748 glutathione synthase (EC 6.3.2.3), | | | | | | |
| | | brain - human >sp\|P48637\|GSHB_HUMAN | | | | | | |
| | | GLUTATHIONE SYNTHETASE (EC 6.3.2.3) | | | | | | |
| | | (GLUTATHIONE SYNTHASE) (GSH SYNTHETASE) | | | | | | |
| | | ( | | | | | | |
| 119 | 731314 | | | 91 | 261 | | | HSPAK79 |
| 120 | 732386 | | | 3 | 632 | | | HLTDQ55 |
| 121 | 732909 | | | 759 | 1220 | | | HLTCA26 |
| 122 | 733088 | (AF029786) GBAS [Homo sapiens] | gi\|3403167 | 1 | 399 | 100 | 100 | HADEY44 |
| | | >sp\|O75323\|O75323 GBAS.Length = 286 | | | | | | |
| 123 | 733351 | | | 287 | 463 | | | HDPCL56 |
| 124 | 733693 | | | 1 | 276 | | | HTPDU59 |
| 125 | 734760 | (AF042379) spindle pole body protein spc97 homolog | gi\|2801701 | 205 | 1584 | 96 | 96 | HEMEU68 |
| | | GCP2 [Homo sapiens] >sp\|O43632\|O43632 SPINDLE | | | | | | |
| | | POLE BODY PROTEIN SPC97 HOMOLOG. Length = | | | | | | |
| | | 902 | | | | | | |
| 126 | 735711 | glutamate pyruvate transaminase [Homo sapiens] | gi\|1763096 | 12 | 842 | 66 | 82 | H2CBI61 |
| | | Length = 496 | | | | | | |
| 127 | 742413 | | | 3 | 779 | | | HFTAS62 |
| 128 | 742676 | common fibrinogen alpha chain [Homo sapiens] | gi\|458554 | 2 | 1081 | 89 | 89 | HLICN22 |
| | | >gi\|182426 A-alpha fibrinogen [Homo sapiens] | | | | | | |
| | | >gi\|4033511 fibrinogen alpha subunit [Homo sapiens] | | | | | | |
| | | >pir\|A93956\|FGHUA fibrinogen alpha chain precursor, | | | | | | |
| | | short splice form - human >gi\|532482 alpha-fibrinogen | | | | | | |
| | | [Homo s | | | | | | |
| 129 | 742781 | | | 344 | 607 | | | HE8AY14 |
| 130 | 743356 | | | 173 | 298 | | | HCFDA89 |
| 131 | 745694 | | | 1 | 105 | | | HETHK36 |
| 132 | 747235 | | | 63 | 743 | | | HEBFI18 |
| 133 | 750986 | syntaxin 7 [Homo sapiens] Length = 261 | gi\|2337920 | 156 | 689 | 83 | 83 | HLQCR21 |
| 134 | 751068 | | | 529 | 810 | | | HRABQ88 |
| 135 | 751164 | | | 1341 | 1736 | | | HCE3G96 |
| 136 | 751890 | | | 18 | 308 | | | HTPBR05 |
| 137 | 751991 | | | 1 | 1530 | | | HMSIS33 |
| 138 | 752449 | | | 1 | 270 | | | HLYDM55 |
| 139 | 752504 | pro-alpha-1 type V collagen [Homo sapiens] | gi\|189520 | 1 | 552 | 94 | 95 | HOUDR20 |
| | | >pir\|S18802\|CGHU1V collagen alpha 1(V) chain | | | | | | |
| | | precursor - human >sp\|Q15094\|Q15094 PRO-ALPHA-1 | | | | | | |
| | | TYPE V COLLAGEN. Length = 1838 | | | | | | |
| 140 | 752688 | (AF006088) p16-Arc [Homo sapiens] >gi\|2407611 | gi\|2282042 | 140 | 451 | 100 | 100 | HEBGK82 |
| | | (AF017807) Arp2/3 complex 16 kDa subunit [Homo | | | | | | |
| | | sapiens] >sp\|O15511\|AR16_HUMAN ARP2/3 | | | | | | |
| | | COMPLEX 16 KD SUBUNIT (P16-ARC). Length = | | | | | | |
| | | 151 | | | | | | |
| 141 | 752889 | testican [Homo sapiens] >sp\|Q08629\|Q08629 | gi\|793845 | 153 | 518 | 87 | 87 | HE8DN77 |
| | | TESTICAN PRECURSOR. >gi\|3282168 (AC005213) | | | | | | |
| | | testican [Homo sapiens] {SUB 237-439} Length = 439 | | | | | | |
| 142 | 753150 | pre-mRNA splicing factor [Homo sapiens] | gi\|307438 | 259 | 1176 | 100 | 100 | HELHM06 |
| | | >pir\|A48133\|A48133 pre-mRNA splicing SRp75 - | | | | | | |
| | | human >gi\|2914669 (AC004236) SRP0001LB [Homo | | | | | | |
| | | sapiens] {SUB 1-192} Length = 494 | | | | | | |
| 143 | 753690 | | | 246 | 743 | | | HHPBG69 |
| 144 | 754479 | | | 160 | 543 | | | HISDF69 |
| 145 | 754692 | (AL031058) dJ512B11.1 (Desmoplakin I (DPI)) [Homo | gnl\|PID\|e1329910 | 338 | 2122 | 87 | 87 | HTTBL33 |
| | | sapiens] >sp\|O7S993\|O75993 DJ512B11.1 | | | | | | |
| | | (DESMOPLAKIN I (DPI)). Length = 2871 | | | | | | |
| 146 | 756814 | glucose transporter glycoprotein [Homo sapiens] | gi\|183303 | 44 | 679 | 90 | 90 | HCWBT85 |
| | | >pir\|A27217\|A27217 glucose transport protein - human | | | | | | |
| | | >sp\|P11166\|GTR1_HUMAN GLUCOSE | | | | | | |
| | | TRANSPORTER TYPE 1, ERYTHROCYTE/BRAIN. | | | | | | |
| | | >bbs\|77925 glucose transporter isoform 1, GLUT 1 | | | | | | |
| | | [mice, embryo, Peptide Partial, 107 | | | | | | |
| 147 | 757127 | | | 253 | 501 | | | HBAFN70 |
| 148 | 757347 | | | 213 | 620 | | | HMSFX70 |
| 149 | 757495 | (AJ010046) guanine nucleotide-exchange factor [Homo | gnl\|PID\|e1363645 | 88 | 1221 | 99 | 100 | HTPBY44 |
| | | sapiens] >sp\|E1363645 E1363645 GUANINE | | | | | | |
| | | NUCLEOTIDE-EXCHANGE FACTOR. Length = 548 | | | | | | |
| 150 | 757715 | (AL008986) similar to tyrosine-protein kinase | gnl\|PID\|e1347680 | 227 | 1729 | 72 | 84 | HEBFD01 |
| | | [Caenorhabditis elegans] >gnl\|PID\|e1348186 similar to | | | | | | |
| | | tyrosine-protein kinase [Caenorhabditis elegans] | | | | | | |
| | | >sp\|O45668\|O45668 H37N21.1 PROTEIN. Length = | | | | | | |
| | | 231 | | | | | | |
| 151 | 760388 | | | 2 | 232 | | | HLWAH26 |
| 152 | 760433 | mutant sterol regulatory element binding protein-2 | gi\|841318 | 2 | 730 | 83 | 89 | HJBDG86 |
| | | [Cricetulus griseus] Length = 839 | | | | | | |
| 153 | 760545 | (AF051426) slow delayed rectifier channel subunit | gi\|2961249 | 1 | 345 | 80 | 81 | HSSFS06 |
| | | [Homo sapiens] >sp\|O60607\|O60607 SLOW | | | | | | |
| | | DELAYED RECTIFIER CHANNEL SUBUNIT. | | | | | | |
| | | Length = 548 | | | | | | |
| 154 | 761566 | protein tyrosine phosphatase PTPCAAX1 [Homo | gi\|1777755 | 601 | 1125 | 99 | 99 | HDPOW14 |
| | | sapiens] >gi\|2961199 (AF051160) tyrosine phosphatase | | | | | | |
| | | [Homo sapiens] >gi\|530162 tyrosine phosphatase [Rattus | | | | | | |
| | | rattus] >gi\|1814024 protein tyrosine phosphatase [Mus | | | | | | |
| | | musculus] >pir\|A56059\|A56059 protein-tyrosine-pho | | | | | | |
| 155 | 761740 | | | 7 | 435 | | | HSIFY01 |
| 156 | 765215 | colipase precursor [Homo sapiens] >gi\|1483624 colipase | gi\|180886 | 25 | 417 | 86 | 86 | HTPCY18 |
| | | [Homo sapiens] >pir\|A42568\|XLHU colipase precursor - | | | | | | |
| | | human >sp\|P04118\|COL_HUMAN COLIPASE | | | | | | |
| | | PRECURSOR. Length = 112 | | | | | | |
| 157 | 765428 | | | 142 | 627 | | | HLYCF90 |
| 158 | 766686 | | | 38 | 901 | | | HNTNP54 |
| 159 | 767396 | (AF050640) NADH-ubiquinone oxidoreductase | gi\|3337443 | 2 | 568 | 87 | 89 | HSKNG05 |
| | | NDUFS2 subunit [Homo sapiens] | | | | | | |
| | | >sp\|G3337443\|G3337443 NADH-UBIQUINONE | | | | | | |
| | | OXIDOREDUCTASE NDUFS2 SUBUNIT. Length = | | | | | | |
| | | 463 | | | | | | |
| 160 | 767501 | L-arginine:glycine amidinotransferase {EC 2.1.4.1} | bbs\|143982 | 1 | 735 | 95 | 95 | HKMMB02 |
| | | [human, kidney carcinoma cells, Peptide, 423 aa] [Homo | | | | | | |
| | | sapiens] >pir\|S41734\|S41734 glycine amidinotransferase | | | | | | |
| | | (BC 2.1.4.1) precursor - human | | | | | | |
| | | >sp\|P50440\|GATM_HUMAN GLYCINE | | | | | | |
| | | AMIDINOTRANSFERASE PRECURSOR (EC | | | | | | |
| 161 | 767945 | | | 183 | 302 | | | HISEB76 |
| 162 | 768996 | | | 209 | 454 | | | HTPCQ34 |
| 163 | 771415 | | | 1 | 747 | | | HTENW77 |
| 164 | 772657 | zyginII [Rattus norvegicus] >sp\|P97578\|P97578 | gi\|1778078 | 110 | 1087 | 69 | 72 | HDQEV69 |
| | | ZYGINII (FRAGMENT). Length = 324 | | | | | | |
| 165 | 773123 | beta-polymerase [Homo sapiens] >gi\|553614 polymerase | gi\|190156 | 278 | 1012 | 35 | 58 | HWHHN55 |
| | | beta [Homo sapiens] {SUB 1-39} Length = 335 | | | | | | |
| 166 | 773193 | | | 246 | 695 | | | HBODO78 |
| 167 | 773710 | | | 3 | 707 | | | HFIYK62 |
| 168 | 774283 | (AF047384) postsynaptic protein CRIPT [Rattus | gi\|3098551 | 3 | 395 | 99 | 99 | HATCI32 |
| | | norvegicus] >sp\|O70333\|O70333 POSTSYNAPTIC | | | | | | |
| | | PROTEIN CRIPT. Length = 101 | | | | | | |
| 169 | 774369 | | | 33 | 224 | | | HDAAC66 |
| 170 | 774754 | (AF013758) polyadenylate binding protein-interacting | gi\|3046900 | 52 | 1239 | 92 | 92 | HE80N42 |
| | | protein-1 [Homo sapiens] >sp\|O60455\|O60455 | | | | | | |
| | | POLYADENYLATE BINDING PROTEIN- | | | | | | |
| | | INTERACTING PROTEIN-1. Length = 480 | | | | | | |
| 171 | 774823 | out at first [Drosophila virilis] >sp\|O18638\|O18638 OUT | gi\|2443448 | 2 | 568 | 46 | 62 | HMKEG85 |
| | | AT FIRST. Length = 305 | | | | | | |
| 172 | 775510 | | | 3 | 98 | | | HVAMK80 |
| 173 | 775634 | | | 106 | 537 | | | HTXBI91 |
| 174 | 775640 | | | 53 | 358 | | | HTWDN88 |
| 175 | 775802 | | | 762 | 971 | | | HJMAF44 |
| 176 | 777470 | Ner-I [Homo sapiens] >pir\|JC4014\|JC4014 steroid | gi\|641962 | 731 | 1621 | 91 | 91 | HTACM37 |
| | | hormone-nuclear receptor NER - human | | | | | | |
| | | >sp\|P55055\|NER_HUMAN NUCLEAR RECEPTOR | | | | | | |
| | | NER (UBIQUITOUSLY-EXPRESSED NUCLEAR | | | | | | |
| | | RECEPTOR). >gi\|608135 orphan receptor [Homo | | | | | | |
| | | sapiens] {SUB 7-461} Length = 461 | | | | | | |
| 177 | 777652 | | | 2 | 340 | | | HDPV110 |
| 178 | 778998 | | | 197 | 409 | | | HISCO10 |
| 179 | 779273 | (AF053091) eyelid [Drosophila melanogaster] | gi\|2981221 | 1 | 699 | 51 | 67 | HRADK51 |
| | | >sp\|O61603\|O61603 EYELID. Length = 2715 | | | | | | |
| 180 | 779297 | cek5 receptor ligand [Mus musculus] Length = 345 | gi\|575929 | 1 | 318 | 100 | 100 | HCEBB53 |
| 181 | 779664 | enhancer-trap-locus-1 [Mus musculus] | gi\|50866 | 184 | 675 | 98 | 99 | HISCI82 |
| | | >pir\|A56559\|A56559 enhancer-trap-locus-1 protein - | | | | | | |
| | | mouse (fragment) >sp\|Q04692\|Q04692 ENHANCER | | | | | | |
| | | TRAP LOCUS 1 (ENHANCER-TRAP-LOCUS 1 | | | | | | |
| | | PROTEIN) (FRAGMENT). Length = 1136 | | | | | | |
| 182 | 780565 | | | 10 | 144 | | | HI5D193 |
| 183 | 780665 | preprochymotrypsinogen (EC 3.4.21.1) [Homo sapiens] | gi\|181190 | 3 | 401 | 100 | 100 | HVANF29 |
| | | >pir\|A31299\|A31299 chymotrypsin (EC 3.4.21.1) | | | | | | |
| | | precursor - human >sp\|P17538\|CTRB_HUMAN | | | | | | |
| | | CHYMOTRYPSINOGEN B PRECURSOR (EC | | | | | | |
| | | 3.4.21.1). Length = 263 | | | | | | |
| 184 | 780666 | preprochymotrypsinogen (EC 3.4.21.1) [Homo sapiens] | gi\|181190 | 57 | 494 | 91 | 93 | HTPDP51 |
| | | >pir\|A31299\|A31299 chymotrypsin (EC 3.4.21.1) | | | | | | |
| | | precursor - human >sp\|P17538\|CTRB_HUMAN | | | | | | |
| | | CHYMOTRYPSINOGEN B PRECURSOR (EC | | | | | | |
| | | 3.4.21.1). Length = 263 | | | | | | |
| 185 | 781579 | 26S proteasome regulatory chain 12 - human Length = | pir\|S65491\|S65491 | 56 | 1102 | 94 | 94 | HLWBI70 |
| | | 321 | | | | | | |
| 186 | 782052 | (AP000002) 376aa long hypothetical dehydrogenase | gnl\|PID\|d1030629 | 76 | 447 | 35 | 58 | HISDQ77 |
| | | [Pyrococcus horikoshii] >sp\|O58320\|O58320\|376AA | | | | | | |
| | | LONG HYPOTHETICAL DEHYDROGENASE. | | | | | | |
| | | Length = 376 | | | | | | |
| 187 | 782393 | | | 3 | 269 | | | HISEC84 |
| 188 | 782907 | | | 2 | 379 | | | HSSFR96 |
| 189 | 783220 | | | 273 | 635 | | | HFXJX12 |
| 190 | 783300 | (AF068195) putative glialblastoma cell differentiation- | gi\|3211975 | 685 | 1392 | 86 | 86 | HDPIZ33 |
| | | related protein [Homo sapiens] >sp\|O75500\|O75500 | | | | | | |
| | | PUTATIVE GLIALBLASTOMA CELL | | | | | | |
| | | DIFFERENTIATION-RELATED PROTEIN. Length = | | | | | | |
| | | 334 | | | | | | |
| 191 | 783938 | | | 1139 | 1495 | | | HTDAE52 |
| 192 | 784024 | | | 355 | 540 | | | HMEIS41 |
| 193 | 784575 | | | 615 | 806 | | | HISAC93 |
| 194 | 785006 | | | 3 | 353 | | | HISDH86 |
| 195 | 785069 | | | 3 | 206 | | | HDTAT56 |
| 196 | 785237 | | | 46 | 132 | | | HDTFQ86 |
| 197 | 786111 | | | 2 | 331 | | | HTPCQ24 |
| 198 | 787036 | (AL008583) dJ327J16.l (human ortholog of mouse | gnl\|PID\|e1370730 | 123 | 518 | 100 | 100 | HSSAL37 |
| | | outer arm Dynein light chain 4) [Homo sapiens] | | | | | | |
| | | Length = 105 | | | | | | |
| 199 | 788991 | | | 74 | 556 | | | HCLBH73 |
| 200 | 789125 | | | 3 | 515 | | | HTXLS64 |
| 201 | 789626 | | | 98 | 742 | | | HFPBL42 |
| 202 | 789703 | | | 2 | 817 | | | HDPJU62 |
| 203 | 789858 | | | 351 | 806 | | | HATEH30 |
| 204 | 790848 | | | 891 | 1067 | | | HTPDK53 |
| 205 | 790893 | | | 29 | 244 | | | HFVIE06 |
| 206 | 790912 | | | 293 | 544 | | | HISET09 |
| 207 | 791386 | ADP-ribosylation factor 1-directed GTPase activating | gi\|1130494 | 1 | 366 | 73 | 84 | HDQFB29 |
| | | protein [Rattus norvegicus] >sp\|Q62848\|Q62848 ADP- | | | | | | |
| | | RIBOSYLATION FACTOR 1-DIRECTED GTPASE | | | | | | |
| | | ACTIVATING PROTEIN. Length = 415 | | | | | | |
| 208 | 791598 | | | 399 | 644 | | | HOEDP59 |
| 209 | 791619 | | | 1 | 1698 | | | HOGCS94 |
| 210 | 791628 | | | 125 | 466 | | | HOEBI96 |
| 211 | 791751 | | | 3 | 464 | | | HE8OL02 |
| 212 | 792557 | (AB004066) DEC1 [Homo sapiens] >pir\|JC5547\|JC5547 | gnl\|PID\|d1022575 | 231 | 470 | 92 | 93 | HAMFQ15 |
| | | basic helix-loop-helix factor DEC1 - human | | | | | | |
| | | >sp\|O14503\|O14503 DEC1. Length = 412 | | | | | | |
| 213 | 792568 | unknown [Saccharomyces cerevisiac] | gi\|763218 | 211 | 882 | 36 | 58 | HUVDR47 |
| | | >pir\|S53571\|S53571 hypothetical protein YIL128w - | | | | | | |
| | | yeast (Saccharomyces cerevisiae) | | | | | | |
| | | >sp\|P40469\|MT18_YEAST DNA | | | | | | |
| | | REPAIRITRANSCRIPTION PROTEIN | | | | | | |
| | | MET18/MMS19.>gi\|599989 unknown [Saccharomyces | | | | | | |
| | | cerevisiae] {SUB 162-1032} Length = | | | | | | |
| 214 | 792590 | O-linked GlcNAc transferase [Homo sapiens] | gi\|2266994 | 1163 | 2656 | 100 | 100 | HTTCQ93 |
| | | >sp\|O15294\|O15294 UDP-N- | | | | | | |
| | | ACETYLULUCOSAMINE--PEPTIDE N- | | | | | | |
| | | ACETYLGLUCOSAMINYLTRANSFERASE 100 KD | | | | | | |
| | | SUBUNIT (EC 2.4.1.-) (O-GLCNACTRANSFERASE | | | | | | |
| | | P100 SUBUNIT). Length = 920 | | | | | | |
| 215 | 793323 | | | 2 | 439 | | | HBWBJ67 |
| 216 | 793466 | | | 567 | 887 | | | HIBCH37 |
| 217 | 793507 | | | 634 | 903 | | | HAGER01 |
| 218 | 793546 | | | 3 | 1088 | | | H2CBU95 |
| 219 | 793559 | | | 137 | 295 | | | HISBT02 |
| 220 | 793604 | (AB008430) CDEP [Homo sapiens] | gnl\|PID\|d1025178 | 3 | 1187 | 96 | 96 | HISBR20 |
| | | >sp\|D1025178\|D1025178 CDEP. Length = 1045 | | | | | | |
| 221 | 794121 | | | 2 | 469 | | | HOEAN65 |
| 222 | 794295 | | | 2 | 433 | | | HFIAA16 |
| 223 | 795241 | F46F6.1 (FRAGMENT). Length = 509 | sp\|Q20473\|Q20473 | 556 | 1089 | 43 | 67 | HOEDV07 |
| 224 | 795286 | | | 132 | 1487 | | | HTJNQ55 |
| 225 | 795637 | | | 2 | 1282 | | | HHBHM95 |
| 226 | 796301 | (AF053367) carboxyl terminal LIM domain protein | gi\|2996196 | 142 | 1104 | 63 | 82 | HKACQ38 |
| | | [Mus musculus] >sp\|O70400\|O70400 CARBOXYL | | | | | | |
| | | TERMINAL LIM DOMAIN PROTEIN. Length = 326 | | | | | | |
| 227 | 796347 | | | 740 | 952 | | | HOGCR67 |
| 228 | 796579 | U2 small nuclear ribonucleoprotein B″ [Homo sapiens] | gi\|340105 | 32 | 847 | 88 | 88 | HOGAQ65 |
| | | >pir\|A25910\|A25910 small nuclear ribonucleoprotein | | | | | | |
| | | U2B″ - human Length = 225 | | | | | | |
| 229 | 796590 | (AF039700) antigen NY-CO-38 [Homo sapiens] | gi\|3170200 | 54 | 572 | 41 | 65 | HTXBD96 |
| | | >sp\|G3170200\|G3170200 ANTIGEN NY-CO-38. | | | | | | |
| | | >gi\|3170198 (AF039699) antigen NY-CO-37 [Homo | | | | | | |
| | | sapiens] {SUB 1-403} Length = 652 | | | | | | |
| 230 | 799783 | | | 1 | 198 | | | HPNAA04 |
| 231 | 799784 | | | 1 | 282 | | | HTPCY49 |
| 232 | 799785 | | | 176 | 373 | | | HTPCW69 |
| 233 | 799786 | | | 26 | 397 | | | HISEL18 |
| 234 | 799787 | | | 78 | 245 | | | HTPDR86 |
| 235 | 799800 | | | 1 | 210 | | | HTPDJ82 |
| 236 | 799808 | pancreatic protease E precursor [Homo sapiens] | gnl\|PID\|d1000660 | 2 | 820 | 97 | 97 | HCCMD30 |
| | | >sp\|P09093\|EL3A_HUMAN ELASTASE IIIA | | | | | | |
| | | PRECURSOR (EC 3.4.21.70) (PROTEASE E). | | | | | | |
| | | Length = 270 | | | | | | |
| 237 | 799977 | (AJ000342) DMBT1 protein, 5.8 kh transcript [Homo | gnl\|PID\|e328724 | 2 | 541 | 81 | 81 | HTPDX19 |
| | | sapiens] >sp\|E328724\|E328724 DMBT1 PROTEIN, 5.8 | | | | | | |
| | | KB TRANSCRIPT PRECURSOR. Length = 1785 | | | | | | |
| 238 | 800149 | (AB017365) frizzled-7 [Homo sapiens] | gnl\|PID\|d1035649 | 3 | 188 | 96 | 96 | HISBC04 |
| | | >sp\|D1035649\|D1035649 FRIZZLED-7. Length = 574 | | | | | | |
| 239 | 800189 | NTGP4 [Nicotiana tabacum] >sp\|G4097585\|G4097585 | gi\|4097585 | 33 | 434 | 45 | 68 | HLDDQ25 |
| | | NTGP4 (FRAGMENT). Length = 344 | | | | | | |
| 240 | 800589 | retinal-specific heterotrimeric GTP-binding protein beta | gi\|1663629 | 137 | 1249 | 99 | 100 | HARAG68 |
| | | subunit, G beta5L [Mus musculus] | | | | | | |
| | | >sp\|G1663629\|G1663629 RETINAL-SPECIFIC | | | | | | |
| | | HETEROTRIMERIC GTP-BINDING PROTEIN BETA | | | | | | |
| | | SUBUNIT, G BETA5L. >gi\|557738 guanine nucleotide | | | | | | |
| | | regulatory protein [Mus musculus] {SU | | | | | | |
| 241 | 800811 | SH3-domain interacting protein [Homo sapiens] | gnl\|PID\|e1226443 | 2 | 601 | 100 | 100 | HSKGN39 |
| | | >sp\|Q15220\|Q15220 PRPL-2 PROTEIN. | | | | | | |
| | | >pir\|S52796\|S52796 prpL2 protein - human (fragment) | | | | | | |
| | | {SUB 92-494} Length = 494 | | | | | | |
| 242 | 800857 | p78 protein [Homo sapiens] >sp\|P20591\|MX1_HUMAN | gi\|190136 | 295 | 2274 | 96 | 96 | HMTBX80 |
| | | INTERFERON-REGULATED RESISTANCE GTP- | | | | | | |
| | | BINDING PROTEIN MXA (INTERFERON- | | | | | | |
| | | INDUCED PROTEIN P78) (IFI-78K). {SUB 2-662} | | | | | | |
| | | Length = 662 | | | | | | |
| 243 | 805721 | | | 3 | 224 | | | HSKYW73 |
| 244 | 805818 | | | 143 | 994 | | | HJABT11 |
| 245 | 806267 | (AF022982) contains similarity to the A-type potassium | gi\|2384910 | 2 | 1018 | 57 | 75 | HDTDM49 |
| | | current class of channel proteins [Caenorhabditis | | | | | | |
| | | elegans] >sp\|O17001\|O17001 T23B12.6 PROTEIN. | | | | | | |
| | | Length = 670 | | | | | | |
| 246 | 806579 | | | 971 | 1282 | | | HIASC33 |
| 247 | 810625 | (AF085691) multidrug resistance-associated protein 3A | gi\|4106442 | 3 | 1019 | 96 | 96 | HWFAD06 |
| | | [Homo sapiens] >sp\|G4106442\|G4106442 | | | | | | |
| | | MULTIDRUG RESISTANCE-ASSOCIATED | | | | | | |
| | | PROTEIN 3A. Length = 1238 | | | | | | |
| 248 | 811153 | SHB = SRC HOMOLOGY 2 PROTEIN. Length = 309 | sp\|G545100\|G545100 | 531 | 881 | 83 | 96 | HDQED71 |
| 249 | 811787 | | | 1201 | 1797 | | | HEONN51 |
| 250 | 812314 | ubiquitin-specific protease [Drosophila melanogaster] | gnl\|PID\|e252797 | 648 | 1514 | 46 | 67 | HUSXO71 |
| | | Length = 898 | | | | | | |
| 251 | 812443 | binding factor-2 box B [Drosophila melanogaster] | gi\|11064 | 2 | 733 | 67 | 85 | HE8PW90 |
| | | >pir\|A42140\|A42140 box B-binding factor-2 - fruit fly | | | | | | |
| | | (Drosophila melanogaster) >sp\|P29747\|BBF2_DROME | | | | | | |
| | | BOX B BINDING FACTOR-2 (BBF-2). Length = 515 | | | | | | |
| 252 | 812498 | | | 1290 | 1550 | | | HE8PW45 |
| 253 | 812504 | (AF035737) general transcription factor 2-I; alternative | gi\|2827180 | 3 | 1601 | 98 | 99 | HFIAT66 |
| | | splice product [Homo sapiens] >sp\|O43546\|O43546 | | | | | | |
| | | GENERAL TRANSCRIPTION FACTOR 2-I, | | | | | | |
| | | ALTERNATIVE SPLICE PRODUCT. Length = 998 | | | | | | |
| 254 | 813079 | GS2NA [Homo sapiens] >pir\|JC2522\|JC2522 nuclear | gi\|805095 | 1 | 756 | 62 | 73 | HCROB17 |
| | | autoantigen - human Length = 713 | | | | | | |
| 255 | 815889 | centrin [Homo sapiens] >sp\|O15182\|O15182 CENTRIN. | gnl\|PID\|e314005 | 1 | 603 | 99 | 100 | HOEFN43 |
| | | Length = 167 | | | | | | |
| 256 | 824358 | oxysterol-binding protein [Homo sapiens] | gi\|189403 | 415 | 1275 | 100 | 100 | HMSKI74 |
| | | >pir\|A34581\|A34581 oxysterol-binding protein - human | | | | | | |
| | | >sp\|P22059\|OXYB_HUMAN OXYSTEROL-BINDING | | | | | | |
| | | PROTEIN. Length = 807 | | | | | | |
| 257 | 826144 | ets-related protein [Homo sapiens] >gnl\|PID\|e225719 | gi\|479167 | 1 | 609 | 100 | 100 | HNFJH73 |
| | | erm [Homo sapiens] >pir\|S43692\|S43692 transcription | | | | | | |
| | | factor erm - human >sp\|P41161\|ERM_HUMAN ETS- | | | | | | |
| | | RELATED PROTEIN ERM (ETS TRANSLOCATION | | | | | | |
| | | VARIANT 5). Length = 510 | | | | | | |
| 258 | 826558 | | | 3 | 266 | | | HTAFE67 |
| 259 | 827471 | cholesterol esterase [Homo sapiens] >bbs\|109185 | gi\|180482 | 1 | 1077 | 96 | 96 | HVANU76 |
| | | pancreatic cholesterol esterase, CEase {internal | | | | | | |
| | | fragment} {EC 3.1.1.13} [human, pWE 15, PTCF, | | | | | | |
| | | Peptide Partial, 28 aa] [Homo sapiens] {SUB 458-485} | | | | | | |
| | | Length = 747 | | | | | | |
| 260 | 827716 | (AF008197) syncollin [Rattus norvegicus] | gi\|2258437 | 2 | 403 | 72 | 84 | HVANR45 |
| | | >sp\|O35775\|O35775 SYNCOLLIN. >gi\|3366638 | | | | | | |
| | | (AF012887) sip9 [Rattus norvegicus] {SUB 8-145] | | | | | | |
| | | Length = 145 | | | | | | |
| 261 | 827722 | | | 1976 | 2116 | | | HISCW21 |
| 262 | 827727 | | | 1192 | 1557 | | | HISCC19 |
| 263 | 828238 | (AC002451) pyruvate dehydrogenase kinase isoform 4 | gi\|2337883 | 2 | 301 | 100 | 100 | HLTGU39 |
| | | [Homo sapiens] >gi\|1399197 pyruvate dehydrogenase | | | | | | |
| | | kinase isoform 4 [Homo sapiens] >gi\|1399210 pyruvate | | | | | | |
| | | dehydrogenase kinase isoform 4 [Homo sapiens] | | | | | | |
| | | >sp\|Q16654\|PDK4_HUMAN [PYRUVATE | | | | | | |
| | | DEHYDROGENASE(LIPOAMIDE | | | | | | |
| 264 | 828573 | | | 3 | 1118 | | | HGCAA50 |
| 265 | 828624 | | | 1305 | 1520 | | | HTOEU64 |
| 266 | 828656 | | | 185 | 403 | | | HISDJ27 |
| 267 | 828848 | pancreatic zymogen granule membrane protein GP-2 | gi\|1244512 | 3 | 1220 | 97 | 97 | HVANS09 |
| | | [Homo sapiens] >pir\|G02091\|G02091 pancreatic | | | | | | |
| | | zymogen granule membrane protein GP-2 - human | | | | | | |
| | | >sp\|P55259\|GP2_HUMAN PANCREATIC | | | | | | |
| | | SECRETORY GRANULE MEMBRANE MAJOR | | | | | | |
| | | GLYCOPROTEIN GP2 PRECURSOR (PANCREATIC | | | | | | |
| | | ZYMOGEN GRA | | | | | | |
| 268 | 828929 | casein kinase I alpha L [Rattus norvegicus] | gi\|1679790 | 3 | 479 | 80 | 80 | HMICG83 |
| | | >sp\|P97634\|P97634 CASEIN KINASE I ALPHA L. | | | | | | |
| | | >gi\|975691 casein kinase I-alpha [Mus musculus] {SUB | | | | | | |
| | | 327-353} Length = 353 | | | | | | |
| 269 | 829008 | GTP-binding protein [Homo sapiens] | gnl\|PID\|e1227622 | 17 | 694 | 80 | 81 | HISAH79 |
| | | >sp\|O43824\|O43824 GTP-BINDING PROTEIN. | | | | | | |
| | | Length = 442 | | | | | | |
| 270 | 829086 | small GTP-binding protein [Oryctolagus cuniculus] | gi\|436001 | 244 | 426 | 82 | 87 | HTPDE66 |
| | | >pir\|A48500\|A48500 small GTP-binding protein Rab25 - | | | | | | |
| | | rabbit Length = 213 | | | | | | |
| 271 | 829192 | pLK [Homo sapiens] Length = 603 | gi\|393017 | 455 | 1270 | 94 | 95 | HMEKC67 |
| 272 | 829310 | SUP35 gene product [Xenopus laevis] | gi\|976219 | 3 | 527 | 90 | 95 | HAMFY36 |
| | | >pir\|S58444\|S58444 SUP35 protein - African clawed | | | | | | |
| | | frog (fragment) Length = 614 | | | | | | |
| 273 | 829319 | | | 407 | 805 | | | HUFDB42 |
| 274 | 829459 | spermatid-specific [Mus musculus] >pir\|A37363\|A37363 | gi\|556310 | 2 | 184 | 97 | 100 | HNFAA17 |
| | | histone H2B, testis - mouse (fragment) | | | | | | |
| | | >sp\|Q64477\|Q64477 HISTONE H2B (FRAGMENT). | | | | | | |
| | | Length = 134 | | | | | | |
| 275 | 829527 | | | 489 | 806 | | | HTTDP69 |
| 276 | 829736 | (ALO3 1532) yeast gtr2 homolog, novel small GTPase | gnl\|PID\|e1319429 | 3 | 1049 | 69 | 86 | HTGCM10 |
| | | subfamily protein [Schizosaccharomyces pombe] | | | | | | |
| | | >sp\|O74544\|O74544 YEAST GTR2 HOMOLOG, | | | | | | |
| | | NOVEL SMALL GTPASE SUBFAMILY PROTEIN. | | | | | | |
| | | Length = 314 | | | | | | |
| 277 | 830552 | | | 329 | 1732 | | | HTTEV24 |
| 278 | 830566 | cathepsin Eprecursor [Homo sapiens] >gi\|181205 | gi\|181194 | 1 | 552 | 99 | 100 | HTPBQ32 |
| | | cathepsin E [Homo sapiens] >pir\|A42038\|A34401 | | | | | | |
| | | cathepsin B (EC 3.4.23.34) precursor - human | | | | | | |
| | | >sp\|P14091\|CATE_HUMAN CATHEPSIN E | | | | | | |
| | | PRECURSOR (EC 3.4.23.34). >sp\|G402841\|G402841 | | | | | | |
| | | CATHEPSIN E, CE = MATURE FORM {N-TERMI | | | | | | |
| 279 | 830568 | tyrosine protein kinase [Homo sapiens] | gi\|306475 | 3 | 1874 | 95 | 95 | HTSGO78 |
| | | >sp\|Q08345\|EDD1_HUMAN EPITHELIAL | | | | | | |
| | | DISCOIDIN DOMAIN RECEPTOR 1 PRECURSOR | | | | | | |
| | | (BC 2.7.1.112) (TYROSINE-PROTEIN KINASE CAK) | | | | | | |
| | | (CELL ADHESION KINASE) (TYROSINE KINASE | | | | | | |
| | | DDR) (DISCOIDIN RECEPTOR TYROSINE | | | | | | |
| | | KINASE) (TRK E) (PROTEIN-T | | | | | | |
| 280 | 830569 | lipase related protein 2 [Homo sapiens] | gi\|187232 | 3 | 1433 | 98 | 98 | HSIAL52 |
| | | >pir\|B43357\|B43357 pancreatic lipase-related protein 2 - | | | | | | |
| | | human >sp\|P54317\|LIP2_HUMAN PANCREATIC | | | | | | |
| | | LIPASE RELATED PROTEIN 2 PRECURSOR (EC | | | | | | |
| | | 3.1.1.3). Length = 469 | | | | | | |
| 281 | 830583 | alpha-tropomyosin 5b [Rattus norvegicus] | gi\|207508 | 1 | 909 | 85 | 85 | HAROA79 |
| | | >pir\|D39816\|D39816 tropomyosin 5b, fibroblast - rat | | | | | | |
| | | >sp\|Q63609\|Q63609 ALPHA-TROPOMYOSIN 5B. | | | | | | |
| | | Length = 248 | | | | | | |
| 282 | 830613 | clathrin-associated protein [Mus musculus] | gi\|191986 | 3 | 1091 | 77 | 90 | HETFJ47 |
| | | >pir\|S19693\|S19693 AP47 protein - mouse | | | | | | |
| | | >sp\|P35585\|AP47_MOUSE CLATHRIN COAT | | | | | | |
| | | ASSEMBLY PROTEIN AP47 (CLATHRIN COAT | | | | | | |
| | | ASSOCIATED PROTEIN AP47) (GOLGI ADAPTOR | | | | | | |
| | | AP-1 47 KD PROTEIN) (HA1 47 KD SUBUNIT) | | | | | | |
| | | (CLATHRIN ASSEMBLY | | | | | | |
| 283 | 830686 | | | 197 | 391 | | | HSTAH26 |
| 284 | 830691 | | | 1343 | 1627 | | | HSXEO71 |
| 285 | 830716 | (AL031393) dJ733D15.1 (Zinc-finger protein) [Homo | gnl\|PID\|e1329909 | 3 | 713 | 62 | 74 | HSSET42 |
| | | sapiens] Length = 496 | | | | | | |
| 286 | 830792 | kallikrein [Homo sapiens] >pir\|A24696\|KQHU tissue | gi\|186653 | 1 | 801 | 99 | 99 | HSDSG96 |
| | | kallikrein (EC 3.4.21.35) precursor - human | | | | | | |
| | | >sp\|P06870\|KLK1_HUMAN GLANDULAR | | | | | | |
| | | KALLIKREIN 1 PRECURSOR (EC 3.4.21.35) | | | | | | |
| | | (TISSUE KALLIKREIN) | | | | | | |
| | | (KIDNEY/PANCREAS/SALIVARY GLAND | | | | | | |
| | | KALLIKREIN). >gi\|386843 kallikrein [Hom | | | | | | |
| 287 | 830893 | | | 29 | 535 | | | HPRTG34 |
| 288 | 830976 | (AF077866) amino acid transporter E16 [Homo sapiens] | gi\|3639058 | 3 | 1244 | 53 | 73 | HDPRH64 |
| | | >sp\|G3639058\|G3639058 AMINO ACID | | | | | | |
| | | TRANSPORTER E16. >gi\|181908 E16 [Homo sapiens] | | | | | | |
| | | {SUB 267-507} Length = 507 | | | | | | |
| 289 | 831043 | adhesive protein - mussel (Trichomya hirsuta) | pir\|S42675\|S42675 | 24 | 257 | 41 | 62 | HOABZ73 |
| | | (fragments) Length = 65 | | | | | | |
| 290 | 831131 | | | 23 | 301 | | | HMTBI28 |
| 291 | 831164 | | | 59 | 331 | | | HMSGB46 |
| 292 | 831173 | pancreatic secretory trypsin inhibitor [Homo sapiens] | gi\|190688 | 194 | 475 | 86 | 86 | HMQBB05 |
| | | >gi\|190694 PSTI [Homo sapiens] >pir \|A27484\|TIHUA | | | | | | |
| | | pancreatic secretory trypsin inhibitor precursor - human | | | | | | |
| | | >sp\|P00995\|IPST_HUMAN PANCREATIC | | | | | | |
| | | SECRETORY TRYPSIN INHIBITOR PRECURSOR | | | | | | |
| | | (TUMOR-ASSOCIATED TRYPSI | | | | | | |
| 293 | 831255 | MLN 64 [Homo sapiens] >db\|\|D38255_1 CAB1 [Homo | gi\|951279 | 198 | 431 | 85 | 92 | HISDU60 |
| | | sapiens] >pir\|I38027\|I38027 MLN 64 protein - human | | | | | | |
| | | >sp\|Q14849\|Q14849 MLN64 MRNA. Length = 445 | | | | | | |
| 294 | 831327 | reg gene homologue [Homo sapiens] >gnl\|PID\|d1004610 | gi\|487726 | 80 | 601 | 90 | 90 | HPASG51 |
| | | regenerating protein I beta [Homo sapiens] | | | | | | |
| | | >gnl\|PID\|d1004643 regenerating protein I beta [Homo | | | | | | |
| | | sapiens] >pir\|S34591\|RGHU1B regenerating islet lectin | | | | | | |
| | | 1-beta precursor - human >sp\|P48304\|LITB_HUMAN | | | | | | |
| | | LITHOST | | | | | | |
| 295 | 831493 | DARPP-32 = DOPAMINE AND CAMP-REGULATED | sp\|G545790\|G545790 | 2 | 256 | 97 | 97 | HISDF31 |
| | | PHOSPHOPROTEIN. >gi\|1244402 DARPP-32 [Mus | | | | | | |
| | | musculus] {SUB 1-27 } Length = 204 | | | | | | |
| 296 | 831500 | endothelin 3 precursor [Homo sapiens] | gi\|182249 | 2 | 364 | 87 | 87 | HWMEM06 |
| | | >pir\|A34378\|A34378 endothelin 3 precursor - human | | | | | | |
| | | >sp\|P14138\|ET3_HUMAN ENDOTHELIN-3 | | | | | | |
| | | PRECURSOR (ET-3). Length = 238 | | | | | | |
| 297 | 831501 | | | 2 | 118 | | | HISBO94 |
| 298 | 831502 | | | 339 | 527 | | | HISCH48 |
| 299 | 831508 | | | 160 | 354 | | | HCRMN21 |
| 300 | 831509 | | | 450 | 752 | | | HISCC33 |
| 301 | 831520 | | | 242 | 424 | | | HHTLE36 |
| 302 | 831547 | match: protein P30711 [Homo sapiens] Length = 240 | gnl\|PID\|e313869 | 2 | 766 | 91 | 92 | HTYTA02 |
| 303 | 831548 | glutathione transferase Ti [Homo sapiens] | gi\|510905 | 3 | 257 | 97 | 97 | HHGDQ55 |
| | | >pir\|S44358\|544358 glutathione 5-transferase Theta - | | | | | | |
| | | human >sp\|P30711\|GTT1_HUMAN GLUTATHIONE | | | | | | |
| | | S-TRANSFERASE THETA 1 (EC 2.5.1.18) (CLASS- | | | | | | |
| | | THETA). {SUB 2-240} Length = 240 | | | | | | |
| 304 | 831558 | | | 3 | 410 | | | HHGCU20 |
| 305 | 831847 | | | 48 | 953 | | | HTPEI64 |
| 306 | 831893 | (AF012023) integrin cytoplasmic domain associated | gi\|2305238 | 167 | 589 | 78 | 78 | HPJDB54 |
| | | protein; Icap-1a [Homo sapiens] >sp\|O14713\|O14713 | | | | | | |
| | | INTEGRIN CYTOPLASMIC DOMAIN ASSOCIATED | | | | | | |
| | | PROTEIN. Length = 200 | | | | | | |
| 307 | 831903 | | | 881 | 1045 | | | HDTEA17 |
| 308 | 831921 | (AF013965) Zis [Rattus norvegicus] >gi\|2317754 | gi\|2317752 | 66 | 410 | 70 | 78 | HMUAR39 |
| | | (AF013966) Zis [Rattus norvegicus] >gi\|2317756 | | | | | | |
| | | (AF013967) Zis [Rattus norvegicus] | | | | | | |
| | | >sp\|O35986\|O35986 ZIS. Length = 332 | | | | | | |
| 309 | 831923 | (AF035527) EHF [Mus musculus] >sp\|O70273\|O70273 | gi\|3138930 | 133 | 1041 | 88 | 93 | HDQEG93 |
| | | ETS HOMOLOGOUS FACTOR (EHF) (EHF). | | | | | | |
| | | Length =300 | | | | | | |
| 310 | 831959 | | | 672 | 956 | | | HDPRY54 |
| 311 | 832008 | cyclin-dependent kinase [Homo sapiens] | gi\|986879 | 1 | 741 | 86 | 86 | HDPQA36 |
| | | >pir\|I68674\|I68674 cyclin-dependent kinase - human | | | | | | |
| | | (fragment) >gi\|425143 cyclin-dependent kinase inhibitor | | | | | | |
| | | [Homo sapiens] {SUB 18-181} Length = 181 | | | | | | |
| 312 | 832107 | | | 2 | 244 | | | HJACF80 |
| 313 | 832110 | T-cell receptor alpha enhancer-binding protein, long | pir\|A39625\|A39625 | 2 | 844 | 91 | 91 | HCFLR04 |
| | | form - human Length = 399 | | | | | | |
| 314 | 832146 | CTP synthetase homolog [Mus musculus] | gi\|1654186 | 3 | 587 | 69 | 77 | HE8OJ09 |
| | | >sp\|P70303\|P70303 CTP SYNTHETASE HOMOLOG | | | | | | |
| | | (CTPSH). Length = 586 | | | | | | |
| 315 | 832189 | | | 251 | 520 | | | HISER65 |
| 316 | 832295 | thymopoietin alpha [Homo sapiens] | gi\|508725 | 3 | 617 | 97 | 97 | HCUDS28 |
| | | >pir\|A55741\|A55741 thymopoictin alpha precursor - | | | | | | |
| | | human Length = 694 | | | | | | |
| 317 | 832334 | coatomer [Bos taurus] >pir\|A49465\|A49465 coatomer | gi\|441486 | 3 | 299 | 98 | 98 | HBICG79 |
| | | zeta chain - bovine >sp\|P35604\|COPZ_BOVIN | | | | | | |
| | | COATOMER ZETA SUBUNIT (ZETA-COAT | | | | | | |
| | | PROTEIN) (ZETA-COP). Length = 177 | | | | | | |
| 318 | 832339 | (AF049105) centrosomal Nek2-associated protein 1 | gi\|2984657 | 2 | 634 | 18 | 50 | HE7TF56 |
| | | [Homo sapiens] >sp\|O6O588\|O60588 CENTROSOMAL | | | | | | |
| | | NEK2-ASSOCIATED PROTEIN 1. Length = 2442 | | | | | | |
| 319 | 832393 | platelet-endothelial tetraspan antigen 3 [Homo sapiens] | gi\|541613 | 49 | 591 | 81 | 81 | HWLHD38 |
| | | >sp\|P48509\|C151_HUMAN PLATELET- | | | | | | |
| | | ENDOTHELIAL TETRASPAN ANTIGEN 3 (PETA-3) | | | | | | |
| | | (GP27) (MEMBRANE GLYCOPROTEIN SFA-1) | | | | | | |
| | | (CD151 ANTIGEN). Length = 253 | | | | | | |
| 320 | 832415 | PC4 [Homo sapiens] >gi\|619161 PC4, p15 [Homo | gi\|531395 | 80 | 475 | 87 | 87 | HCDMB85 |
| | | sapiens] >pir\|A54670\|A54670 RNA polymerase II | | | | | | |
| | | transcription cofactor p15 - human | | | | | | |
| | | >sp\|P53999\|P15_HUMAN ACTIVATED RNA | | | | | | |
| | | POLYMERASE II TRANSCRIPTIONAL | | | | | | |
| | | COACTIVATOR P15 (PC4) (P14). {SUB 2-127} | | | | | | |
| | | Length = 127 | | | | | | |
| 321 | 832422 | | | 3 | 1112 | | | HAMGD22 |
| 322 | 832448 | (AF006751) ES/130 [Homo sapiens] | gi\|3299885 | 1 | 777 | 65 | 65 | HAJBU71 |
| | | >sp\|O75 300\|O75300 ES/130. Length = 977 | | | | | | |
| 323 | 832532 | protein serine/threonine kinase [Homo sapiens] | gi\|3 1221 | 2 | 532 | 100 | 100 | HMKDZ23 |
| | | >pir\|A48082\|A48082 mitogen-activated protein kinase | | | | | | |
| | | p44-erk1 - human Length = 379 | | | | | | |
| 324 | 832621 | | | 1 | 462 | | | H2CBH76 |
| 325 | 832622 | (AF056209) PAM COOH-terminal interactor protein 1 | gi\|3560563 | 78 | 569 | 97 | 97 | H2CAA56 |
| | | [Homo sapiens] >gi\|3560563 (AF056209) PAM COOH- | | | | | | |
| | | terminal interactor protein 1 [Homo sapiens] | | | | | | |
| | | >sp\|O75901\|O75901 PAM COOH-TERMINAL | | | | | | |
| | | INTERACTOR PROTEIN 1. Length = 435 | | | | | | |
| 326 | 835327 | | | 140 | 355 | | | HTPCS09 |
| 327 | 835695 | (AF031174) Ig-like membrane protein [Homo sapiens] | gi\|3766136 | 2 | 997 | 52 | 75 | HDPFQ22 |
| | | Length = 1215 | | | | | | |
| 328 | 835857 | (AC004549) TXBP151 [Homo sapiens] | gi\|3046307 | 1 | 1728 | 100 | 100 | HEQBZ28 |
| | | >sp\|O60398\|O60398 TXBP151. Length = 563 | | | | | | |
| 329 | 836183 | | | 46 | 978 | | | HWLGV14 |
| 330 | 836190 | | | 1586 | 1813 | | | HLTAV24 |
| 331 | 836196 | | | 2 | 319 | | | HOECJ56 |
| 332 | 836253 | | | 1 | 363 | | | HNSAC43 |
| 333 | 836372 | Similar to sulfatase [Caenorhabditis elegans] | gi\|1125842 | 794 | 1177 | 58 | 73 | HOELR57 |
| | | >sp\|Q21376\|Q21376 SIMILAR TO SULFATASE. | | | | | | |
| | | NCBI GI: 1125842. Length = 709 | | | | | | |
| 334 | 837077 | similar to BPTI/KUNITZ inhibitor domain; | gnl\|PID\|e1345870 | 3 | 572 | 48 | 61 | HEOMV66 |
| 335 | 837445 | (AF046888) proliferation inducing ligand APRIL [Homo | gi\|365O492 | 801 | 1580 | 90 | 90 | HDQFH76 |
| | | sapiens] >sp\|O75888\|O75888 PROLIFERATION | | | | | | |
| | | INDUCING LIGAND APRIL. Length = 250 | | | | | | |
| 336 | 837620 | (AF002210) copper chaperone for superoxide dismutase | gi\|2431868 | 1 | 930 | 99 | 99 | HTLDR72 |
| | | [Homo sapiens] >sp\|O14618\|O14618 COPPER | | | | | | |
| | | CHAPERONE FOR SUPEROXIDE DISMUTASE. | | | | | | |
| | | Length = 274 | | | | | | |
| 337 | 837981 | beta-1,6-N-acetylglucosaminyltransferase [Homo | gi\|183441 | 346 | 1740 | 58 | 74 | HTPBB03 |
| | | sapiens] >gi\|886273 beta-1,6-N- | | | | | | |
| | | acetylglucosaminyltransferase [Homo sapiens] | | | | | | |
| | | >pir\|A46293\|A46293 beta-1,3-galactosyl-O-glycosyl- | | | | | | |
| | | glycoprotein beta-1,6-N-acetylglucosaminyltransferase | | | | | | |
| | | (EC 2.4.1.102) - human >sp\| | | | | | | |
| 338 | 837995 | aminopeptidase N precursor (EC 3.4.11.2) [Homo | gi\|178536 | 301 | 3231 | 94 | 94 | HDPAY72 |
| | | sapiens] >pir\|A30325\|A30325 membrane alanyl | | | | | | |
| | | aminopeptidase (BC 3.4.11.2) precursor - human | | | | | | |
| | | Length = 967 | | | | | | |
| 339 | 838001 | lysyl hydroxylase isoform 2 [Homo sapiens] | gi\|2138314 | 1 | 2553 | 93 | 93 | HOHAU14 |
| | | >sp\|O00469\|PLO2_HUMAN PROCOLLAGEN- | | | | | | |
| | | LYSINE,2-OXOGLUTARATE 5-DIOXYGENASE 2 | | | | | | |
| | | PRECURSOR (EC 1.14.11.4) (LYSYL | | | | | | |
| | | HYDROXYLASE 2) (LH2). Length = 737 | | | | | | |
| 340 | 838237 | alpha-N-acetylgalactosaminide alpha-2,6- | gi\|453197 | 3 | 416 | 58 | 74 | HWMFG72 |
| | | sialyltransferase [Gallus gallus] >pir\|A49880\|A49880 | | | | | | |
| | | alpha-N-acetylgalactosaminide alpha-2,6- | | | | | | |
| | | sialyltransferase (EC 2.4.99.3) - chicken | | | | | | |
| | | >sp\|Q92183\|CAG3_CHICK ALPHA-N- | | | | | | |
| | | ACETYLGALACTOSAMINIDE ALPHA-2,6- | | | | | | |
| | | SIALYLTRANSFERASE | | | | | | |
| 341 | 838700 | | | 2 | 1756 | | | HDTGB81 |
| 342 | 838805 | (AL032653) similar to Ubiquitin-conjugating enzymes; | gnl\|PID\|e1350657 | 3 | 485 | 61 | 78 | HAMGK18 |
| 343 | 839096 | (AF027302) TNF-alpha stimulated ABC protein [Homo | gi\|2522534 | 666 | 1559 | 84 | 84 | HDPJC76 |
| | | sapiens] >sp\|O14897\|O14897 TNF-ALPHA | | | | | | |
| | | STIMULATED ABC PROTEIN. Length = 807 | | | | | | |
| 344 | 839185 | similar to ATP-binding transport protein family (ABC | gi\|500734 | 1323 | 2165 | 49 | 69 | HDPFR49 |
| | | transporters) [Caenorhabditis elegans] | | | | | | |
| | | >sp\|Q20306\|Q20306 GCN20 PROTEIN HOMOLOG. | | | | | | |
| | | Length = 712 | | | | | | |
| 345 | 839588 | | | 710 | 904 | | | HLHEV35 |
| 346 | 839589 | synthetic preproinsulin [artificial sequence] >gi\|58103 | gi\|208668 | 1 | 498 | 80 | 80 | HCCMB04 |
| | | reading frame proinsulin [unidentified] {SUB 28-114} | | | | | | |
| | | >gi\|208664 insulin B chain [artificial sequence] {SUB | | | | | | |
| | | 28-58} >gi\|208660 insulin beta chain [artificial | | | | | | |
| | | sequence] {SUB 29-58} >gi\|929915 insulin C | | | | | | |
| 347 | 839733 | RGL2 [Homo sapiens] >sp\|O15211\|O15211 RGL2. | gnl\|PID\|e1186796 | 1098 | 2681 | 90 | 90 | HYACI02 |
| | | >gnl\|PID\|d1037179 (AB012295) GDS-related protein | | | | | | |
| | | [Homo sapiens] {SUB 656-777} Length = 777 | | | | | | |
| 348 | 839874 | mitochondrial NAD(P)+ -dependent malic enzyme | gi\|187300 | 102 | 1058 | 96 | 97 | HDPPO41 |
| | | [Homo sapiens] >pir\|A39503\|A39503 malate | | | | | | |
| | | dehydrogenase (NAD+) (EC 1.1.1.-) precursor, | | | | | | |
| | | mitochondrial - human >sp\|P23368\|MAOM_HUMAN | | | | | | |
| | | MALATE OXIDOREDUCTASE [NAD], | | | | | | |
| | | MITOCHONDRIAL PRECURSOR (EC 1.1.1.40) | | | | | | |
| | | (MALIC ENZYM | | | | | | |
| 349 | 840017 | FKBP65 binding protein [Mus musculus] | gi\|894162 | 2 | 1303 | 86 | 92 | HL1BI67 |
| | | >pir\|I49669\|I49669 FKBP65 binding protein - mouse | | | | | | |
| | | >sp\|Q61576\|Q61576 FK506 BINDING PROTEIN 6 (65 | | | | | | |
| | | KDA) (FKBP65 BINDING PROTEIN). Length = 581 | | | | | | |
| 350 | 840124 | | | 937 | 1311 | | | HNHGX94 |
| 351 | 840222 | P24 protein [Mus musculus] >sp\|P97799\|P97799 | gnl\|PID\|d1019688 | 28 | 747 | 35 | 47 | HISES36 |
| | | VESICULAR MEMBRAIN PROTEIN P24 (P24 | | | | | | |
| | | PROTEIN). Length = 196 | | | | | | |
| 352 | 840617 | (AF033861) type III adenylyl cyclase [Homo sapiens] | gi\|4104226 | 35 | 2599 | 91 | 91 | HTPDM11 |
| | | >sp\|G4104226\|G4104226 TYPE III ADENYLYL | | | | | | |
| | | CYCLASE. >gnl\|PID\|d1026367 (AB011083) | | | | | | |
| | | KIAA0511 protein [Homo sapiens] {SUB 212-1144} | | | | | | |
| | | >sp\|G299652\|G299652 TYPE III ADENYLYL | | | | | | |
| | | CYCLASE, TYPE III AC {EC 4.6.1.1}. {SUB | | | | | | |
| 353 | 840641 | RGS10 protein - human Length = 173 | pir\|S71812\|S71812 | 2 | 622 | 100 | 100 | HULFJ24 |
| 354 | 840792 | sigma 3A protein [Homo sapiens] >gi\|1923270 AP-3 | gnl\|PID\|e256812 | 1 | 699 | 100 | 100 | HOEJT19 |
| | | complex sigma3A subunit [Homo sapiens] | | | | | | |
| | | >gnl{PID}d1010444 clathrin coat assembly protein-like | | | | | | |
| | | [Homo sapiens] >gi\|3462900 (AF084575) adaptor | | | | | | |
| | | protein complex-3 sigma3A subunit isoform [Mus | | | | | | |
| | | musculus] >gi\|192327 | | | | | | |
| 355 | 840915 | Tob [Homo sapiens] Length = 345 | gnl\|PID\|d1008002 | 411 | 1469 | 82 | 82 | H2MBF94 |
| 356 | 841059 | | | 583 | 828 | | | HISBL50 |
| 357 | 841325 | FAC1 gene product [Homo sapiens] | gi\|1276428 | 6 | 989 | 95 | 95 | HFEBE52 |
| | | >pir\|G01252\|G01252 small GTP binding protein, | | | | | | |
| | | homologous to SEC4 - human >sp\|Q12830\|Q12830 | | | | | | |
| | | FETAL ALZ-50-REACTIVE CLONE 1 (FAd). | | | | | | |
| | | Length = 810 | | | | | | |
| 358 | 841713 | | | 3 | 872 | | | HWHGW75 |
| 359 | 842324 | | | 487 | 837 | | | HLWBQ31 |
| 360 | 842386 | | | 201 | 671 | | | HCFDA62 |
| 361 | 842454 | mitochondrial ATPase inhibitor [Rattus norvegicus] | gi\|517226 | 1 | 231 | 76 | 88 | HVAMF27 |
| | | >gnl\|PID\|d1002924 ATPase inhibitor protein precursor | | | | | | |
| | | [Rattus sp.] >pir\|JS0738\|JS0738 ATPase inhibitor | | | | | | |
| | | protein precursor, mitochondrial - rat | | | | | | |
| | | >sp\|Q03344\|IATP_RAT ATPASE INHIBITOR, | | | | | | |
| | | MITOCHONDRIAL PRECURSOR. | | | | | | |
| 362 | 842768 | | | 179 | 400 | | | HRABQ15 |
| 363 | 842999 | | | 2 | 1354 | | | HNTSM88 |
| 364 | 843830 | dJ434P1.3 [Homo sapiens] >gi\|1592565 DEAD-box | gnl\|PID\|e1249592 | 3 | 635 | 93 | 93 | HMSPB89 |
| | | protein p72 [Homo sapiens] >pir\|S72367\|S72367 ATP- | | | | | | |
| | | dependent RNA helicase - human | | | | | | |
| | | >sp\|Q92841\|P72_HUMAN PROBABLE RNA- | | | | | | |
| | | DEPENDENT HELICASE P72 (DEAD-BOX | | | | | | |
| | | PROTEIN P72). Length = 650 | | | | | | |
| 365 | 844723 | | | 1 | 66 | | | HLYBO68 |
| 366 | 844868 | (AF092557) LIM domain only 7 [Homo sapiens] | gi\|4028544 | 1 | 1179 | 56 | 74 | HHPBC57 |
| | | >sp\|G4028544\|G4028544 LIM DOMAIN ONLY 7 | | | | | | |
| | | (FRAGMENT). Length = 120 | | | | | | |
| 367 | 845258 | MRAS2 gene product [Rhizomucor racemosus] | gi\|553070 | 131 | 925 | 30 | 45 | HKAKW86 |
| | | Length = 198 | | | | | | |
| 368 | 845373 | | | 183 | 1847 | | | HNTEE61 |
| 369 | 845412 | (AB003184) ISLR [Homo sapiens] >sp\|O14498\|O14498 | dbj\|\|AB003184_{—1} | 303 | 1178 | 87 | 87 | HCRNP15 |
| | | ISLR PRECURSOR. Length = 428 | | | | | | |
| 370 | HISED43R | | | 29 | 283 | | | HISED43 |
| 371 | HOSEQ76R | | | 165 | 308 | | | HOSEQ76 |
| 372 | HISDS43R | | | 1 | 141 | | | HISDS43 |
| 373 | HPJDY28R | | | 53 | 136 | | | HPJDY28 |
| 374 | HTPBW71R | | | 29 | 94 | | | HTPBW71 |
| 375 | HCQAG14R | | | 18 | 173 | | | HCQAG14 |
| 376 | HVANP48R | | | 14 | 271 | | | HVANP48 |
| 377 | HGBGO86R | (AB005546) porcine serum amyloid P component (SAP) | gnl\|PID\|d1022321 | 2 | 139 | 66 | 76 | HGBGO86 |
| | | [Sus scrofa] >sp\|O19063\|O19063 PORCINE SERUM | | | | | | |
| | | AMYLOID P COMPONENT (SAP) PRECURSOR | | | | | | |
| | | (SAP). Length = 224 | | | | | | |
| 378 | HISDW59R | (AB012223) ORF2 [Canis familiaris] | gnl\|PID\|d1026181 | 261 | 647 | 51 | 72 | HISDW59 |
| | | >sp\|O62658\|O62658 LINE-1 ELEMENT ORF2. | | | | | | |
| | | Length = 1275 | | | | | | |
| 379 | HDBAM16R | (AF000381) non-functional folate binding protein | gi\|2565196 | 189 | 416 | 88 | 88 | HDBAM16 |
| | | [Homo sapiens] >sp\|O14597\|O14597 NON- | | | | | | |
| | | FUNCTIONAL FOLATE BINDING PROTEIN. | | | | | | |
| | | Length = 254 | | | | | | |
| 380 | HTPGD92R | (AF016692) small intestinal mucin MUC3 [Homo | gi\|2454615 | 3 | 308 | 46 | 46 | HTPGD92 |
| | | sapiens] >pir\|PC4395\|PC4395 mucin 3 - human | | | | | | |
| | | (fragment) >sp\|O14760\|O14760 SMALL INTESTINAL | | | | | | |
| | | MUCIN MUC3 (FRAGMENT). Length = 648 | | | | | | |
| 381 | HHFLB69R | (AF018432) dUTPase [Homo sapiens] >gi\|1144332 | gi\|2443581 | 3 | 245 | 100 | 100 | HHFLB69 |
| | | deoxyuridine nucleotidohydrolase [Homo sapiens] | | | | | | |
| | | >gi\|1421818 deoxyuridine triphosphatase [Homo | | | | | | |
| | | sapiens] >pir\|G02777\|G02777 dUTP pyrophosphatase | | | | | | |
| | | (EC 3.6.1.23) - human >gi\|292877 dUTP | | | | | | |
| | | nucleotidohydrolase [Homo sa | | | | | | |
| 382 | HPDEH50R | (AF026689) prostate-specific transglutaminase [Homo | gi\|3523113 | 2 | 166 | 66 | 72 | HPDEH50 |
| | | sapiens] >sp\|075320\|O75320 PROSTATE-SPECIFIC | | | | | | |
| | | TRANSGLUTAMINASE (FRAGMENT). Length = 51 | | | | | | |
| 383 | HMTMA16R | (AF042081) SH3 domain binding glutamic acid-rich-like | gi\|3337420 | 3 | 299 | 100 | 100 | HMTMA16 |
| | | protein [Homo sapiens] >sp\|O75368\|O75368 SH3 | | | | | | |
| | | DOMAIN BINDING GLUTAMIC ACID-RICH-LIKE | | | | | | |
| | | PROTEIN. Length = 114 | | | | | | |
| 384 | HTNAP71R | (AF080484) thyroglobulin [Homo sapiens] | gi\|3415051 | 2 | 199 | 95 | 95 | HTNAP71 |
| | | >sp\|G3415051\|G3415051 THYROGLOBULIN | | | | | | |
| | | (FRAGMENT). Length = 680 | | | | | | |
| 385 | HTPGL88R | (AF081673) bile salt-dependent lipase oncofetal isoform | gi\|3421403 | 3 | 434 | 97 | 98 | HTPGL88 |
| | | [Homo sapiens] >sp\|O75612\|O75612 BILE SALT- | | | | | | |
| | | DEPENDENT LIPASE ONCOFETAL ISOFORM | | | | | | |
| | | (FRAGMENT). Length = 612 | | | | | | |
| 386 | HMCIA86R | actin [Absidia glauca] >pir\|S03109\|S03109 actin - pin | gi\|578097 | 2 | 250 | 88 | 100 | HMCIA86 |
| | | mould (Absidia glauca) (fragment) | | | | | | |
| | | >sp\|P10982\|ACT1_ABSGL ACTIN 1 (FRAGMENT). | | | | | | |
| | | >gi\|669036 actin [Absidia glauca] {SUB 3-140} | | | | | | |
| | | Length = 140 | | | | | | |
| 387 | HAPOC60R | alpha-catenin [Homo sapiens] >gi\|4092761 (AF102803) | gnl\|PID\|d1003485 | 2 | 505 | 77 | 80 | HAPOC60 |
| | | alphaE-catenin [Homo sapiens] >pir\|JN0607\|JN0607 | | | | | | |
| | | aipha-catenin - human >sp\|P35221\|CTN1_HUMAN | | | | | | |
| | | ALPHA-1 CATENIN (CADHERIN-ASSOCIATED | | | | | | |
| | | PROTEIN) (ALPHA E-CATENIN). Length = 906 | | | | | | |
| 388 | HDTFE89R | antibody, heavy chain variable regin to HIV1 gpl20 | gi\|732750 | 3 | 329 | 75 | 78 | HDTFE89 |
| | | [Homo sapiens] Length = 127 | | | | | | |
| 389 | HAJBO38R | Bat2 [Homo sapiens] >pir\|S37671\|S37671 bat2 protein - | gi\|29375 | 1 | 435 | 94 | 94 | HAJBO38 |
| | | human Length = 1870 | | | | | | |
| 390 | HCCMA90R | BILE SALT-DEPENDENT LIPASE. Length = 720 | sp\|Q16398\|Q16398 | 3 | 329 | 75 | 75 | HCCMA90 |
| 391 | HTLHH34R | carnitine O-acetyltransferase (EC 2.3.1.7) precursor, | pir\|A55720\|A55720 | 3 | 602 | 97 | 97 | HTLHH34 |
| | | mitochondrial - human >sp\|P43155{CACP_HUMAN | | | | | | |
| | | CARNITINE O-ACETYLTRANSFERASE (EC 2.3.1.7) | | | | | | |
| | | (CARNITINE ACETYLASE) (CAT) (FRAGMENT). | | | | | | |
| | | {SUB 3-626} Length = 626 | | | | | | |
| 392 | HWHPY22R | CLN3 protein [Homo sapiens] >gnl\|PID\|e283670 CLN3 | gi\|1039423 | 1 | 432 | 95 | 95 | HWHPY22 |
| | | protein [Homo sapiens] >gi\|2947055 (AC002425) CLN3 | | | | | | |
| | | [Homo sapiens] >gi\|3337387 (AC002544) CLN [Homo | | | | | | |
| | | sapiens] >gi\|4102729 (AF015593) CLN3 protein [Homo | | | | | | |
| | | sapiens] >pir\|A57219\|A57219 Batten disease-related | | | | | | |
| | | prot | | | | | | |
| 393 | HCWFF39R | collagen alpha 1(V) chain precursor [Homo sapiens] | gnl\|PID\|d1015029 | 3 | 407 | 65 | 65 | HCWFF39 |
| | | >sp\|P20908\|CA15_HUMAN PROCOLLAGEN ALPHA | | | | | | |
| | | 1(V) CHAIN PRECURSOR. >gi\|1020326 alpha-1 type | | | | | | |
| | | V collagen [Homo sapiens] {SUB 1-36} Length = 1838 | | | | | | |
| 394 | HBBBA92R | cytochrome oxidase subunit I [Anas platyrhynchos] | gi\|348683 | 31 | 240 | 41 | 58 | HBBBA92 |
| | | >sp\|P50656\|COX1_ANAPL CYTOCHROME C | | | | | | |
| | | OXIDASE POLYPEPTIDE I (EC 1.9.3.1) | | | | | | |
| | | (FRAGMENT). Length = 102 | | | | | | |
| 395 | HTLHP03R | dipeptidase precursor [Homo sapiens] Length = 411 | gnl\|PID\|d1002931 | 3 | 413 | 92 | 92 | HTLHP03 |
| 396 | HCCMA63R | elastase III B [Homo sapiens] >pir\|B29934\|B29934 | gi\|182035 | 1 | 252 | 96 | 96 | HCCMA63 |
| | | pancreatic elastase (EC 3.4.21.36) IIIB precursor - | | | | | | |
| | | human >sp\|P08861\|EL3B_HUMAN ELASTASE IIIB | | | | | | |
| | | PRECURSOR (EC 3.4.21.70) (PROTEASE B). | | | | | | |
| | | Length = 270 | | | | | | |
| 397 | HE8EZ78R | endosomal protein [Homo sapiens] >pir\|S44243\|S44243 | gi\|475934 | 2 | 352 | 98 | 100 | HE8EZ78 |
| | | endosomal protein - human >sp\|Q15075\|Q15075 | | | | | | |
| | | ENDOSOMAL PROTEIN. Length = 1411 | | | | | | |
| 398 | HGLAQ29R | erythroid DNA-binding protein [Homo sapiens] | gi\|183072 | 1 | 186 | 50 | 54 | HGLAQ29 |
| | | >gi\|31243 Eryf1 transcription factor (AA 1-413) [Homo | | | | | | |
| | | sapiens] >pir\|A34888\|A34888 transcription factor | | | | | | |
| | | GATA-1 - human >sp\|P15976\|GAT1_HUMAN | | | | | | |
| | | ERYTHROID TRANSCRIPTION FACTOR (GATA-1) | | | | | | |
| | | (ERYF1) (GF-1) (NF-E1). Length | | | | | | |
| 399 | HALSD82R | fibrinogen gamma-prime chain [Homo sapiens] | gi\|182440 | 1 | 399 | 98 | 100 | HALSD82 |
| | | >sp\|P04469\|FIBH_HUMAN FIBRINOGEN GAMMA- | | | | | | |
| | | B CHAIN PRECURSOR (FIBRINOGEN GAMMA). | | | | | | |
| | | >gi\|182443 gamma fibrinogen type B (AA at 202) | | | | | | |
| | | [Homo sapiens] {SUB 285-453} Length = 453 | | | | | | |
| 400 | H2LAS44R | gamma subunit of CCT chaperonin [Homo sapiens] | gi\|671527 | 75 | 560 | 99 | 99 | H2LAS44 |
| | | >pir\|S61529\|A38983 TCP1 ring complex protein TRiC5 - | | | | | | |
| | | human Length = 544 | | | | | | |
| 401 | HTXPA42R | GTP-binding protein (rab7) [Canis familiaris] | gi\|164058 | 166 | 432 | 98 | 100 | HTXPA42 |
| | | >pir\|B30413\|B30413 GTP-binding protein rab7 - dog | | | | | | |
| | | Length = 207 | | | | | | |
| 402 | HBWAH57R | hCRMP-2 [Homo sapiens] >gnl\|PID\|d1011853 | gi\|1244400 | 2 | 121 | 92 | 94 | HBWAH57 |
| | | dihydropyrimidinase related protein-2 [Homo sapiens] | | | | | | |
| | | >gi\|2967519 N2A3 [Homo sapiens] >pir\|JC5317\|JC5317 | | | | | | |
| | | dihydropyrimidinase-related protein 2 - human | | | | | | |
| | | >sp\|Q16555\|DPY2_HUMAN | | | | | | |
| | | DIHYDROPYRIMIDINASE RELATED PROTEIN-2 | | | | | | |
| | | (DRP | | | | | | |
| 403 | HAHEJ39R | HSJ1a [Homo sapiens] >pir\|523509\|S23509 dnaJ protein | gi\|32470 | 2 | 370 | 84 | 84 | HAHEJ39 |
| | | homolog - human Length = 277 | | | | | | |
| 404 | HOEMQ04R | hypoxia-inducible factor 1 alpha [Homo sapiens] | gi\|881346 | 3 | 299 | 100 | 100 | HOEMQ04 |
| | | >gi\|1144013 ARNT interacting protein [Homo sapiens] | | | | | | |
| | | >pir\|I38972\|I38972 hypoxia-inducible factor 1 alpha - | | | | | | |
| | | human >sp\|Q16665\|HIFA_HUMAN HYPOXIA- | | | | | | |
| | | INDUCIBLE FACTOR 1 ALPHA (HIF-1 ALPHA) | | | | | | |
| | | (ARNT INTERACTING PROTEIN) | | | | | | |
| 405 | HAPBR18R | Ig kappa L-chain variable region [Homo sapiens] | gi\|1905938 | 29 | 325 | 67 | 70 | HAPBR18 |
| | | Length = 122 | | | | | | |
| 406 | HOENU56R | | | 1 | 288 | | | HOENU56 |
| 407 | HAGGB37R | L-arginine: glycine amidinotransferase [Homo sapiens] | gi\|791049 | 2 | 238 | 83 | 83 | HAGGB37 |
| | | >pir\|S54161\|S54161 L-arginine--glycine | | | | | | |
| | | amidinotransferase - human Length = 391 | | | | | | |
| 408 | HCCMC02R | lipase related protein 2 [Homo sapiens] | gi\|187232 | 1 | 357 | 61 | 64 | HCCMC02 |
| | | >pir\|B43357\|B43357 pancreatic lipase-related protein 2 - | | | | | | |
| | | human >sp\|P54317\|LIP2_HUMAN PANCREATIC | | | | | | |
| | | LIPASE RELATED PROTEIN 2 PRECURSOR (EC | | | | | | |
| | | 3.1.1.3). Length = 469 | | | | | | |
| 409 | HAHDO57R | located at OATL1 [Homo sapiens] >sp\|Q14827\|Q14827 | gi\|950411 | 3 | 536 | 100 | 100 | HAHDO57 |
| | | DNA SEGMENT, JOHNS HOPKINS UNIVERSITY 1 | | | | | | |
| | | (MG21) (FRAGMENT). Length = 166 | | | | | | |
| 410 | HOEMK29R | lysyl oxidase-2 [Mus musculus] >sp\|P97873\|P97873 | gi\|2636697 | 3 | 116 | 97 | 97 | HOEMK29 |
| | | LYSYL OXIDASE-LIKE (LYSYL OXIDASE-2) | | | | | | |
| | | (LYSYL OXIDASE-LIKE PROTEIN) (FRAGMENT). | | | | | | |
| | | Length = 110 | | | | | | |
| 411 | HRADJ65R | ORF protein; C-terminal (aa 125-319; 196aa) [Homog | gi\|37610 | 1 | 357 | 98 | 98 | HRADJ65 |
| | | sapiens] Length = 196 | | | | | | |
| 412 | HTPCT95R | pancreatic elastase IIB zymogen [Homo sapiens] | gi\|182060 | 2 | 340 | 98 | 98 | HTPCT95 |
| | | >pir\|C26823\|C26823 pancreatic elastase II (EC | | | | | | |
| | | 3.4.21.71) B precursor - human | | | | | | |
| | | >sp\|P08218\|EL2B_HUMAN ELASTASE 2B | | | | | | |
| | | PRECURSOR (EC 3.4.21.71). Length = 269 | | | | | | |
| 413 | HLQFY56R | pancreatitis associated protein [Homo sapiens] | gi\|189601 | 281 | 493 | 94 | 94 | HLQFY56 |
| | | Length = 174 | | | | | | |
| 414 | HCCMD33R | phospholipase [Homo sapiens] >gi\|387025 | gi\|190013 | 109 | 345 | 77 | 77 | HCCMD33 |
| | | phospholipase [Homo sapiens] >gi\|2769697 | | | | | | |
| | | (AC003982) Phosphatidyicholine 2-acylhydrolase | | | | | | |
| | | [Homo sapiens] >pir\|C25793\|PSHU phospholipase A2 | | | | | | |
| | | (EC 3,1 1.4) precursor, pancreatic - human | | | | | | |
| | | >sp\|P04054\|PA21_HUMAN PHOSPHOLIPASE | | | | | | |
| 415 | HDPAQ04R | PQ-rich protein [Homo sapiens] >pir\|S58222\|S58222 | gi\|929660 | 3 | 125 | 85 | 85 | HDPAQ04 |
| | | PQ-rich protein - human >sp\|Q15184\|Q15184 PQ-RICH | | | | | | |
| | | PROTEIN. Length = 400 | | | | | | |
| 416 | HCE4L96R | PRSM1 [Homo sapiens] >pir\|JC4963\|JC4963 | gi\|1354931 | 3 | 194 | 89 | 89 | HCE4L96 |
| | | metalloproteinase 1 (EC 3.4.24.-) - human | | | | | | |
| | | >sp\|Q15779\|Q15779 PRSM1. Length = 318 | | | | | | |
| 417 | HTPGL86R | putative surface glycoprotein [Homo sapiens] | gnl\|PID\|e188111 | 32 | 322 | 85 | 85 | HTPGL86 |
| | | >sp\|P53801\|C211_HUMAN PUTATIVE SURFACE | | | | | | |
| | | GLYCOPROTEIN C21ORF1 PRECURSOR | | | | | | |
| | | (C21ORF3). Length = 180 | | | | | | |
| 418 | HLQGB61R | reg gene homologue [Homo sapiens] >gnl\|PID\|d1004610 | gi\|487726 | 21 | 182 | 92 | 92 | HLQGB61 |
| | | regenerating protein I beta [Homo sapiens] | | | | | | |
| | | >gnl\|PID\|d1004643 regenerating protein I beta [Homo | | | | | | |
| | | sapiens] >pir\|S34591\|RGHU1B regenerating islet lectin | | | | | | |
| | | 1-beta precursor - human >sp\|P48304\|LITB_HUMAN | | | | | | |
| | | LITHOST | | | | | | |
| 419 | HWDAK95R | RNA splicing-related protein [Rattus norvegicus] | gnl\|PID\|d1024790 | 141 | 362 | 82 | 88 | HWDAK95 |
| | | >sp\|O54729\|O54729 BRAIN. Length = 712 | | | | | | |
| 420 | HE9DG72R | selenium-binding protein [Homo sapiens] | gi\|1374792 | 1 | 414 | 95 | 96 | HE9DG72 |
| | | >pir\|G01872\|G01872 selenium-binding protein - human | | | | | | |
| | | >sp\|Q13228\|Q13228 SELENIUM-BINDING PROTEIN. | | | | | | |
| | | Length = 472 | | | | | | |
| 421 | HDPOY89R | Similar to sulfatase [Caenorhabditis elegans] | gi\|1125842 | 132 | 452 | 47 | 71 | HDPOY89 |
| | | >sp\|Q21376\|Q21376 SIMILAR TO SULFATASE. | | | | | | |
| | | NCBI GI: 1125842. Length = 709 | | | | | | |
| 422 | HAHEJ13R | sperm membrane protein [Rattus norvegicus] | gi\|207694 | 1 | 366 | 58 | 60 | HAHEJ13 |
| | | >pir\|A35981\|A35981 sperm membrane protein - rat | | | | | | |
| | | Length = 191 | | | | | | |
| 423 | HOEMR16R | tyrosine phosphatase precursor [Homo sapiens] | gi\|32067 | 3 | 80 | 76 | 84 | HOEMR16 |
| | | >sp\|Q14513\|Q14513 TYROSINE PHOSPHATASE | | | | | | |
| | | PRECURSOR (EC 3.1.3.48). Length = 793 | | | | | | |
| 424 | HCFCM83R | ubiquitin--protein ligase E1 homolog - human | pir\|A48195\|A48195 | 168 | 269 | 94 | 94 | HCFCM83 |
| | | Length = 1058 | | | | | | |
| 425 | H6BSB07R | | | 1 | 105 | | | H6BSB07 |
| 426 | HAGCC01R | | | 1 | 219 | | | HAGCC01 |
| 427 | HAQAM88R | | | 49 | 372 | | | HAQAM88 |
| 428 | HAUBA62R | | | 3 | 233 | | | HAUBA62 |
| 429 | HBCMA07R | | | 3 | 164 | | | HBCMA07 |
| 430 | HBGNU45R | | | 132 | 293 | | | HBGNU45 |
| 431 | HBJHW09R | | | 142 | 309 | | | HBJHW09 |
| 432 | HBMBJ92R | | | 3 | 173 | | | HBMBJ92 |
| 433 | HCGBC37R | | | 1 | 219 | | | HCGBC37 |
| 434 | HCROI22R | | | 105 | 236 | | | HCROI22 |
| 435 | HDTLK21R | | | 184 | 351 | | | HDTLK21 |
| 436 | HDTLX11R | | | 234 | 518 | | | HDTLX11 |
| 437 | HE2CM25R | | | 27 | 470 | | | HE2CM25 |
| 438 | HE9FI19R | | | 1 | 183 | | | HE9FI19 |
| 439 | HEGAD29R | | | 234 | 344 | | | HEGAD29 |
| 440 | HFKHC10R | | | 118 | 267 | | | HFKHC10 |
| 441 | HFPAE25R | | | 174 | 332 | | | HFPAE25 |
| 442 | HGBHA95R | | | 3 | 161 | | | HGBHA95 |
| 443 | HHBEA82R | | | 139 | 387 | | | HHBEA82 |
| 444 | HISCX64R | | | 1 | 312 | | | HISCX64 |
| 445 | HLCAB30R | | | 1 | 72 | | | HLCAB30 |
| 446 | HLDOW24R | | | 147 | 296 | | | HLDOW24 |
| 447 | HLLBA89R | | | 56 | 220 | | | HLLBA89 |
| 448 | HLQDE48R | | | 299 | 523 | | | HLQDE48 |
| 449 | HNEDI54R | | | 1 | 84 | | | HNEDI54 |
| 450 | HNHGQ70R | | | 1 | 423 | | | HNHGQ70 |
| 451 | HOSMV19R | | | 151 | 291 | | | HOSMV19 |
| 452 | HTPGJ41R | | | 89 | 340 | | | HTPGJ41 |
| 453 | HTTHJ11R | | | 1 | 90 | | | HTTHJ11 |
| 454 | HULEB88R | | | 2 | 376 | | | HULEB88 |
| 455 | HUSJN92R | | | 284 | 460 | | | HUSJN92 |
| 456 | HWAEJ52R | | | 1 | 285 | | | HWAEJ52 |
| 457 | HWLMS12R | | | 136 | 321 | | | HWLMS12 |
| 458 | HWLWG58R | | | 1 | 108 | | | HWLWG58 |
| 459 | HAIDL46R | X104 [Homo sapiens] >pir\|I54378\|I54378 gene X104 | gi\|498013 | 3 | 224 | 55 | 57 | HAIDL46 |
| | | protein - human >sp\|Q15883\|Q15883 X104. | | | | | | |
| | | >gi\|3462868 (AF083892) tight junction protein ZO-2 | | | | | | |
| | | isoform A [Homo sapiens] {SUB 1-166} >gi\|3462870 | | | | | | |
| | | (AF083 893) tight junction protein ZO-2 isoform C | | | | | | |
| | | [Homo sapiens] {S | | | | | | |

[0044] The first column of Table 1 shows the “SEQ ID NO:” for each of the 459 pancreatic cancer antigen polynucleotide sequences of the invention.

[0045] The second column in Table 1, provides a unique “Sequence/Contig ID” identification for each pancreas and/or pancreatic cancer associated sequence. The third column in Table 1, “Gene Name,” provides a putative identification of the gene based on the sequence similarity of its translation product to an amino acid sequence found in a publicly accessible gene database, such as GenBank (NCBI). The great majority of the cDNA sequences reported in Table 1 are unrelated to any sequences previously described in the literature. The fourth column, in Table 1, “Overlap,” provides the database accession no. for the database sequence having similarity. The fifth and sixth columns in Table 1 provide the location (nucleotide position nos. within the contig), “Start” and “End”, in the polynucleotide sequence “SEQ ID NO:X” that delineate the preferred ORF shown in the sequence listing as SEQ ID NO:Y. In one embodiment, the invention provides a protein comprising, or alternatively consisting of, a polypeptide encoded by the portion of SEQ ID NO:X delineated by the nucleotide position nos. “Start” and “End”. Also provided are polynucleotides encoding such proteins and the complementary strand thereto. The seventh and eighth columns provide the “% Id” (percent identity) and “% Si” (percent similarity) observed between the aligned sequence segments of the translation product of SEQ ID NO:X and the database sequence.

[0046] The ninth column of Table 1 provides a unique “Clone ID” for a clone related to each contig sequence. This clone ID references the cDNA clone which contains at least the 5′ most sequence of the assembled contig and at least a portion of SEQ ID NO:X was determined by directly sequencing the referenced clone. The reference clone may have more sequence than described in the sequence listing or the clone may have less. In the vast majority of cases, however, the clone is believed to encode a full-length polypeptide. In the case where a clone is not full-length, a full-length cDNA can be obtained by methods described elsewhere herein.

[0047] Table 3 indicates public ESTs, of which at least one, two, three, four, five, ten, or more of any one or more of these public ESTs are optionally excluded from the invention.

[0048] SEQ ID NO:X (where X may be any of the polynucleotide sequences disclosed in the sequence listing as SEQ ID NO:1 through SEQ ID NO:459) and the translated SEQ ID NO:Y (where Y may be any of the polypeptide sequences disclosed in the sequence listing as SEQ ID NO:460 through SEQ ID NO:918) are sufficiently accurate and otherwise suitable for a variety of uses well known in the art and described further below. For instance, SEQ ID NO:X has uses including, but not limited to, in designing nucleic acid hybridization probes that will detect nucleic acid sequences contained in SEQ ID NO:X or the related cDNA clone contained in a library deposited with the ATCC. These probes will also hybridize to nucleic acid molecules in biological samples, thereby enabling immediate applications in chromosome mapping, linkage analysis, tissue identification and/or typing, and a variety of forensic and diagnostic methods of the invention. Similarly, polypeptides identified from SEQ ID NO:Y have uses that include, but are not limited to, generating antibodies which bind specifically to the pancreatic cancer antigen polypeptides, or fragments thereof, and/or to the pancreatic cancer antigen polypeptides encoded by the cDNA clones identified in Table 1.

[0049] Nevertheless, DNA sequences generated by sequencing reactions can contain sequencing errors. The errors exist as misidentified nucleotides, or as insertions or deletions of nucleotides in the generated DNA sequence. The erroneously inserted or deleted nucleotides cause frame shifts in the reading frames of the predicted amino acid sequence. In these cases, the predicted amino acid sequence diverges from the actual amino acid sequence, even though the generated DNA sequence may be greater than 99.9% identical to the actual DNA sequence (for example, one base insertion or deletion in an open reading frame of over 1000 bases).

[0050] Accordingly, for those applications requiring precision in the nucleotide sequence or the amino acid sequence, the present invention provides not only the generated nucleotide sequence identified as SEQ ID NO:X, the predicted translated amino acid sequence identified as SEQ ID NO:Y, but also a sample of plasmid DNA containing the related cDNA clone (deposited with the ATCC, as set forth in Table 1). The nucleotide sequence of each deposited clone can readily be determined by sequencing the deposited clone in accordance with known methods. Further, techniques known in the art can be used to verify the nucleotide sequences of SEQ ID NO:X.

[0051] The predicted amino acid sequence can then be verified from such deposits. Moreover, the amino acid sequence of the protein encoded by a particular clone can also be directly determined by peptide sequencing or by expressing the protein in a suitable host cell containing the deposited human cDNA, collecting the protein, and determining its sequence.

[0052] The present invention also relates to vectors or plasmids which include such DNA sequences, as well as the use of the DNA sequences. The material deposited with the ATCC on:

TABLE 2

| ATCC Deposits | Deposit Date | ATCC Designation Number |
|---|---|---|
| LP01, LP02, LP03, | May-20-97 | 209059,209060, 209061, |
| LP04, LP05, LP06, | | 209062, 209063, 209064, |
| LP07, LP08, LP09, | | 209065, 209066, 209067, |
| LP10, LP11, | | 209068, 209069 |
| LP12 | Jan-12-98 | 209579 |
| LP13 | Jan-12-98 | 209578 |
| LP14 | Jul-16-98 | 203067 |
| LP15 | Jul-16-98 | 203068 |
| LP16 | Feb-1-99 | 203609 |
| LP17 | Feb-1-99 | 203610 |
| LP20 | Nov-17-98 | 203485 |
| LP21 | Jun-18-99 | PTA-252 |
| LP22 | Jun-18-99 | PTA-253 |
| LP23 | Dec-22-99 | PTA-1081 |

[0053] each is a mixture of cDNA clones derived from a variety of human tissue and cloned in either a plasmid vector or a phage vector, as shown in Table 5. These deposits are referred to as “the deposits” herein. The tissues from which the clones were derived are listed in Table 5, and the vector in which the cDNA is contained is also indicated in Table 5. The deposited material includes the cDNA clones which were partially sequenced and are related to the SEQ ID NO:X described in Table 1 (column 9). Thus, a clone which is isolatable from the ATCC Deposits by use of a sequence listed as SEQ ID NO:X may include the entire coding region of a human gene or in other cases such clone may include a substantial portion of the coding region of a human gene. Although the sequence listing lists only a portion of the DNA sequence in a clone included in the ATCC Deposits, it is well within the ability of one skilled in the art to complete the sequence of the DNA included in a clone isolatable from the ATCC Deposits by use of a sequence (or portion thereof) listed in Table 1 by procedures hereinafter further described, and others apparent to those skilled in the art.

[0054] Also provided in Table 5 is the name of the vector which contains the cDNA clone. Each vector is routinely used in the art. The following additional information is provided for convenience.

[0055] Vectors Lambda Zap (U.S. Pat. Nos. 5,128,256 and 5,286,636), Uni-Zap XR (U.S. Pat. Nos. 5,128,256 and 5,286,636), Zap Express (U.S. Pat. Nos. 5,128,256 and 5,286,636), pBluescript (pBS) (Short, J. M. et al., Nucleic Acids Res. 16:7583-7600 (1988); Alting-Mees, M. A. and Short, J. M., Nucleic Acids Res. 17:9494 (1989)) and pBK (Alting-Mees, M. A. et al., Strategies 5:58-61 (1992)) are commercially available from Stratagene Cloning Systems, Inc., 11011 N. Torrey Pines Road, La Jolla, Calif., 92037. pBS contains an ampicillin resistance gene and pBK contains a neomycin resistance gene. Phagemid pBS may be excised from the Lambda Zap and Uni-Zap XR vectors, and phagemid pBK may be excised from the Zap Express vector. Both phagemids may be transformed into E. coli strain XL-1 Blue, also available from Stratagene.

[0056] Vectors pSport1, pCMVSport 1.0, pCMVSport 2.0 and pCMVSport 3.0, were obtained from Life Technologies, Inc., P. O. Box 6009, Gaithersburg, Md. 20897. All Sport vectors contain an ampicillin resistance gene and may be transformed into E. coli strain DH10B, also available from Life Technologies. See, for instance, Gruber, C. E., et al., Focus 15:59 (1993). Vector lafmid BA (Bento Soares, Columbia University, New York, N.Y.) contains an ampicillin resistance gene and can be transformed into E. coli strain XL-1 Blue. Vector pCR®2.1, which is available from Invitrogen, 1600 Faraday Avenue, Carlsbad, Calif. 92008, contains an ampicillin resistance gene and may be transformed into E. coli strain DH10B, available from Life Technologies. See, for instance, Clark, J. M., Nuc. Acids Res. 16:9677-9686 (1988) and Mead, D. et al., Bio/Technology 9: (1991).

[0057] The present invention also relates to the genes corresponding to SEQ ID NO:X, SEQ ID NO:Y, and/or the cDNA contained in a deposited cDNA clone. The corresponding gene can be isolated in accordance with known methods using the sequence information disclosed herein. Such methods include, but are not limited to, preparing probes or primers from the disclosed sequence and identifying or amplifying the corresponding gene from appropriate sources of genomic material.

[0058] Also provided in the present invention are allelic variants, orthologs, and/or species homologs. Procedures known in the art can be used to obtain full-length genes, allelic variants, splice variants, full-length coding portions, orthologs, and/or species homologs of genes corresponding to SEQ ID NO:X, SEQ ID NO:Y, and/or the cDNA contained in the related cDNA clone in the deposit, using information from the sequences disclosed herein or the clones deposited with the ATCC. For example, allelic variants and/or species homologs may be isolated and identified by making suitable probes or primers from the sequences provided herein and screening a suitable nucleic acid source for allelic variants and/or the desired homologue.

[0059] The present invention provides a polynucleotide comprising, or alternatively consisting of, the nucleic acid sequence of SEQ ID NO:X, and/or the related cDNA clone (See, e.g., columns 1 and 9 of Table 1). The present invention also provides a polypeptide comprising, or alternatively, consisting of, the polypeptide sequence of SEQ ID NO:Y, a polypeptide encoded by SEQ ID NO:X, and/or a polypeptide encoded by the cDNA in the related cDNA clone contained in a deposited library. Polynucleotides encoding a polypeptide comprising, or alternatively consisting of, the polypeptide sequence of SEQ ID NO:Y, a polypeptide encoded by SEQ ID NO:X, and/or a polypeptide encoded by the the dDNA in the related cDNA clone contained in a deposited library, are also encompassed by the invention. The present invention further encompasses a polynucleotide comprising, or alternatively consisting of, the complement of the nucleic acid sequence of SEQ ID NO:X, and/or the complement of the coding strand of the related cDNA clone contained in a deposited library.

[0060] Many polynucleotide sequences, such as EST sequences, are publicly available and accessible through sequence databases and may have been publicly available prior to conception of the present invention. Preferably, such related polynucleotides are specifically excluded from the scope of the present invention. To list every related sequence would unduly burden the disclosure of this application. Accordingly, for each “Contig Id” listed in the first column of Table 3, preferably excluded are one or more polynucleotides comprising a nucleotide sequence described in the second column of Table 3 by the general formula of a-b, each of which are uniquely defined for the SEQ ID NO:X corresponding to that Contig Id in Table 1. Additionally, specific embodiments are directed to polynucleotide sequences excluding at least one, two, three, four, five, ten, or more of the specific polynucleotide sequences referenced by the Genbank Accession No. for each Contig Id which may be included in column 3 of Table 3. In no way is this listing meant to encompass all of the sequences which may be excluded by the general formula, it is just a representative example.

TABLE 3

| Sequence/ | | |
|---|---|---|
| Contig ID | General formula | Genbank Accession No. |
| 456379 | Preferably excluded from the present invention are one or | R34554, AA018972, AA055489 |
| | more polynucleotides comprising a nucleotide sequence | |
| | described by the general formula of a-b, where a is any | |
| | integer between 1 to 551 of SEQ ID NO: 1, b is an integer | |
| | of 15 to 565, where both a and b correspond to the | |
| | positions of nucleotide residues shown in SEQ ID NO: 1, | |
| | and where b is greater than or equal to a + 14. | |
| 462108 | Preferably excluded from the present invention are one or | T79903, R46289, R73001, R73606, N30140, N35752, W32520, W32636, |
| | more polynucleotides comprising a nucleotide sequence | AA018675, AA018676, AA040600, AA040683, AA070495, AA070381, |
| | described by the general formula of a-b, where a is any | AA083072, AA134451, AA207060, AA207086 |
| | integer between 1 to 1677 of SEQ ID NO: 2, b is an integer | |
| | of 15 to 1691, where both a and b correspond to the | |
| | positions of nucleotide residues shown in SEQ ID NO: 2, | |
| | and where b is greater than or equal to a + 14. | |
| 503446 | Preferably excluded from the present invention are one or | |
| | more polynucleotides comprising a nucleotide sequence | |
| | described by the general formula of a-b, where a is any | |
| | integer between 1 to 466 of SEQ ID NO: 3, b is an integer | |
| | of 15 to 480, where both a and b correspond to the | |
| | positions of nucleotide residues shown in SEQ ID NO: 3, | |
| | and where b is greater than or equal to a + 14. | |
| 507841 | Preferably excluded from the present invention are one or | R12126, R14285 |
| | more polynucleotides comprising a nucleotide sequence | |
| | described by the general formula of a-b, where a is any | |
| | integer between 1 to 594 of SEQ ID NO: 4, b is an integer | |
| | of 15 to 608, where both a and b correspond to the | |
| | positions of nucleotide residues shown in SEQ ID NO: 4, | |
| | and where b is greater than or equal to a + 14. | |
| 509287 | Preferably excluded from the present invention are one or | H01699, H94037, N30572, N57219, N64393, N92189, AA035664, AA037022, |
| | more polynucleotides comprising a nucleotide sequence | AA045335, AA045422, AA056367, AA115587 |
| | described by the general formula of a-b, where a is any | |
| | integer between 1 to 682 of SEQ ID NO: 5, b is an integer | |
| | of 15 to 696, where both a and b correspond to the | |
| | positions of nucleotide residues shown in SEQ ID NO: 5, | |
| | and where b is greater than or equal to a + 14. | |
| 509672 | Preferably excluded from the present invention are one or | |
| | more polynucleotides comprising a nucleotide sequence | |
| | described by the general formula of a-b, where a is any | |
| | integer between 1 to 278 of SEQ ID NO: 6, b is an integer | |
| | of 15 to 292, where both a and b correspond to the | |
| | positions of nucleotide residues shown in SEQ ID NO: 6, | |
| | and where b is greater than or equal to a + 14. | |
| 509673 | Preferably excluded from the present invention are one or | |
| | more polynucleotides comprising a nucleotide sequence | |
| | described by the general formula of a-b, where a is any | |
| | integer between 1 to 348 of SEQ ID NO: 7, b is an integer | |
| | of 15 to 362, where both a and b correspond to the | |
| | positions of nucleotide residues shown in SEQ ID NO: 7, | |
| | and where b is greater than or equal to a + 14. | |
| 518767 | Preferably excluded from the present invention are one or | |
| | more polynucleotides comprising a nucleotide sequence | |
| | described by the general formula of a-b, where a is any | |
| | integer between 1 to 391 of SEQ ID NO: 8, b is an integer | |
| | of 15 to 405, where both a and b correspond to the | |
| | positions of nucleotide residues shown in SEQ ID NO: 8, | |
| | and where b is greater than or equal to a + 14. | |
| 522008 | Preferably excluded from the present invention are one or | T63280, R50010, R78743, R78742, H52248, H52346, H91191, AA028894, |
| | more polynucleotides comprising a nucleotide sequence | AA031289, AA121197, AA150816, AA160833 |
| | described by the general formula of a-b, where a is any | |
| | integer between 1 to 1013 of SEQ ID NO: 9, b is an integer | |
| | of 15 to 1027, where both a and b correspond to the | |
| | positions of nucleotide residues shown in SEQ ID NO: 9, | |
| | and where b is greater than or equal to a + 14. | |
| 524112 | Preferably excluded from the present invention are one or | H49520, H66748, H68803, H68904, N45520, W42600, W42573, AA134942, |
| | more polynucleotides comprising a nucleotide sequence | AA151361, AA227110, AA251434 |
| | described by the general formula of a-b, where a is any | |
| | integer between 1 to 1501 of SEQ ID NO: 10, b is an | |
| | integer of 15 to 1515, where both a and b correspond to the | |
| | positions of nucleotide residues shown in SEQ ID NO: 10, | |
| | and where b is greater than or equal to a + 14. | |
| 525971 | Preferably excluded from the present invention are one or | W81027, AA133066 |
| | more polynucleotides comprising a nucleotide sequence | |
| | described by the general formula of a-b, where a is any | |
| | integer between 1 to 833 of SEQ ID NO: 11, b is an integer | |
| | of 15 to 847, where both a and b correspond to the | |
| | positions of nucleotide residues shown in SEQ ID NO: 11, | |
| | and where b is greater than or equal to a + 14. | |
| 527156 | Preferably excluded from the present invention are one or | W23806 |
| | more polynucleotides comprising a nucleotide sequence | |
| | described by the general formula of a-b, where a is any | |
| | integer between 1 to 492 of SEQ ID NO: 12, b is an integer | |
| | of 15 to 506, where both a and b correspond to the | |
| | positions of nucleotide residues shown in SEQ ID NO: 12, | |
| | and where b is greater than or equal to a + 14. | |
| 532502 | Preferably excluded from the present invention are one or | |
| | more polynucleotides comprising a nucleotide sequence | |
| | described by the general formula of a-b, where a is any | |
| | integer between 1 to 253 of SEQ ID NO: 13, b is an integer | |
| | of 15 to 267, where both a and b correspond to the | |
| | positions of nucleotide residues shown in SEQ ID NO: 13, | |
| | and where b is greater than or equal to a + 14. | |
| 533459 | Preferably excluded from the present invention are one or | |
| | more polynucleotides comprising a nucleotide sequence | |
| | described by the general formula of a-b, where a is any | |
| | integer between 1 to 905 of SEQ ID NO: 14, b is an integer | |
| | of 15 to 919, where both a and b correspond to the | |
| | positions of nucleotide residues shown in SEQ ID NO: 14, | |
| | and where b is greater than or equal to a + 14. | |
| 533551 | Preferably excluded from the present invention are one or | H44763, H44764, AA011378, AA011366, AA215758 |
| | more polynucleotides comprising a nucleotide sequence | |
| | described by the general formula of a-b, where a is any | |
| | integer between 1 to 2545 of SEQ ID NO: 15, b is an | |
| | integer of 15 to 2559, where both a and b correspond to the | |
| | positions of nucleotide residues shown in SEQ ID NO: 15, | |
| | and where b is greater than or equal to a + 14. | |
| 537850 | Preferably excluded from the present invention are one or | T68458, T68523, T83911, R07511, R07564, R10442, R11516, T80802, |
| | more polynucleotides comprising a nucleotide sequence | T81206, T83580, T83740, T85796, R06434, R06489, H40512, H47544, |
| | described by the general formula of a-b, where a is any | H47543, R85697, R89315, R89396, R91325, R96709, H59265, H59311, |
| | integer between 1 to 1490 of SEQ ID NO: 16, b is an | H64291, H78244, H78445, H90091, H94341, H94427 |
| | integer of 15 to 1504, where both a and b correspond to the | |
| | positions of nucleotide residues shown in SEQ ID NO: 16, | |
| | and where b is greater than or equal to a + 14. | |
| 537925 | Preferably excluded from the present invention are one or | AA085845 |
| | more polynucleotides comprising a nucleotide sequence | |
| | described by the general formula of a-b, where a is any | |
| | integer between 1 to 819 of SEQ ID NO: 17, b is an integer | |
| | of 15 to 833, where both a and b correspond to the | |
| | positions of nucleotide residues shown in SEQ ID NO: 17, | |
| | and where b is greater than or equal to a + 14. | |
| 38160 | Preferably excluded from the present invention are one or | W52418 |
| | more polynucleotides comprising a nucleotide sequence | |
| | described by the general formula of a-b, where a is any | |
| | integer between 1 to 629 of SEQ ID NO: 18, b is an integer | |
| | of 15 to 643, where both a and b correspond to the | |
| | positions of nucleotide residues shown in SEQ ID NO: 18, | |
| | and where b is greater than or equal to a + 14. | |
| 540420 | Preferably excluded from the present invention are one or | |
| | more polynucleotides comprising a nucleotide sequence | |
| | described by the general formula of a-b, where a is any | |
| | integer between 1 to 326 of SEQ ID NO: 19, b is an integer | |
| | of 15 to 340, where both a and b correspond to the | |
| | positions of nucleotide residues shown in SEQ ID NO: 19, | |
| | and where b is greater than or equal to a + 14. | |
| 540802 | Preferably excluded from the present invention are one or | R27496, W05560, W40286, AA147911 |
| | more polynucleotides comprising a nucleotide sequence | |
| | described by the general formula of a-b, where a is any | |
| | integer between 1 to 659 of SEQ ID NO: 20, b is an integer | |
| | of 15 to 673, where both a and b correspond to the | |
| | positions of nucleotide residues shown in SEQ ID NO: 20, | |
| | and where b is greater than or equal to a + 14. | |
| 540989 | Preferably excluded from the present invention are one or | |
| | more polynucleotides comprising a nucleotide sequence | |
| | described by the general formula of a-b, where a is any | |
| | integer between 1 to 401 of SEQ ID NO: 21, b is an integer | |
| | of 15 to 415, where both a and b correspond to the | |
| | positions of nucleotide residues shown in SEQ ID NO: 21, | |
| | and where b is greater than or equal to a + 14. | |
| 540997 | Preferably excluded from the present invention are one or | W39752 |
| | more polynucleotides comprising a nucleotide sequence | |
| | described by the general formula of a-b, where a is any | |
| | integer between 1 to 619 of SEQ ID NO: 22, b is an integer | |
| | of 15 to 633, where both a and b correspond to the | |
| | positions of nucleotide residues shown in SEQ ID NO: 22, | |
| | and where b is greater than or equal to a + 14. | |
| 548735 | Preferably excluded from the present invention are one or | T61438, R72243, AA134330 |
| | more polynucleotides comprising a nucleotide sequence | |
| | described by the general formula of a-b, where a is any | |
| | integer between 1 to 2409 of SEQ ID NO: 23, b is an | |
| | integer of 15 to 2423, where both a and b correspond to the | |
| | positions of nucleotide residues shown in SEQ ID NO: 23, | |
| | and where b is greater than or equal to a + 14. | |
| 549709 | Preferably excluded from the present invention are one or | |
| | more polynucleotides comprising a nucleotide sequence | |
| | described by the general formula of a-b, where a is any | |
| | integer between 1 to 370 of SEQ ID NO: 24, b is an integer | |
| | of 15 to 384, where both a and b correspond to the | |
| | positions of nucleotide residues shown in SEQ ID NO: 24, | |
| | and where b is greater than or equal to a + 14. | |
| 550007 | Preferably excluded from the present invention are one or | AA058407 |
| | more polynucleotides comprising a nucleotide sequence | |
| | described by the general formula of a-b, where a is any | |
| | integer between 1 to 886 of SEQ ID NO: 25, b is an integer | |
| | of 15 to 900, where both a and b correspond to the | |
| | positions of nucleotide residues shown in SEQ ID NO: 25, | |
| | and where b is greater than or equal to a + 14. | |
| 550118 | Preferably excluded from the present invention are one or | |
| | more polynucleotides comprising a nucleotide sequence | |
| | described by the general formula of a-b, where a is any | |
| | integer between 1 to 1308 of SEQ ID NO: 26, b is an | |
| | integer of 15 to 1322, where both a and b correspond to the | |
| | positions of nucleotide residues shown in SEQ ID NO: 26, | |
| | and where b is greater than or equal to a + 14. | |
| 550148 | Preferably excluded from the present invention are one or | |
| | more polynucleotides comprising a nucleotide sequence | |
| | described by the general formula of a-b, where a is any | |
| | integer between 1 to 443 of SEQ ID NO: 27, b is an integer | |
| | of 15 to 457, where both a and b correspond to the | |
| | positions of nucleotide residues shown in SEQ ID NO: 27, | |
| | and where b is greater than or equal to a + 14. | |
| 550870 | Preferably excluded from the present invention are one or | |
| | more polynucleotides comprising a nucleotide sequence | |
| | described by the general formula of a-b, where a is any | |
| | integer between 1 to 582 of SEQ ID NO: 28, b is an integer | |
| | of 15 to 596, where both a and b correspond to the | |
| | positions of nucleotide residues shown in SEQ ID NO: 28, | |
| | and where b is greater than or equal to a + 14. | |
| 552506 | Preferably excluded from the present invention are one or | |
| | more polynucleotides comprising a nucleotide sequence | |
| | described by the general formula of a-b, where a is any | |
| | integer between 1 to 422 of SEQ ID NO: 29, b is an integer | |
| | of 15 to 436, where both a and b correspond to the | |
| | positions of nucleotide residues shown in SEQ ID NO: 29, | |
| | and where b is greater than or equal to a + 14. | |
| 553765 | Preferably excluded from the present invention are one or | T56196, T60502, T68045, T68126, T68223, T68924, T68956, T69698, |
| | more polynucleotides comprising a nucleotide sequence | T70509, T71155, T72771, T73042, T74806, H47199, H93928 |
| | described by the general formula of a-b, where a is any | |
| | integer between 1 to 1300 of SEQ ID NO: 30, b is an | |
| | integer of 15 to 1314, where both a and b correspond to the | |
| | positions of nucleotide residues shown in SEQ ID NO: 30, | |
| | and where b is greater than or equal to a + 14. | |
| 554050 | Preferably excluded from the present invention are one or | T47267, T71354, R60150, R73621, H61209, H61252, H61301, H62114, |
| | more polynucleotides comprising a nucleotide sequence | W73095, AA100106 |
| | described by the general formula of a-b, where a is any | |
| | integer between 1 to 1453 of SEQ ID NO: 31, b is an | |
| | integer of 15 to 1467, where both a and b correspond to the | |
| | positions of nucleotide residues shown in SEQ ID NO: 31, | |
| | and where b is greater than or equal to a + 14. | |
| 554186 | Preferably excluded from the present invention are one or | |
| | more polynucleotides comprising a nucleotide sequence | |
| | described by the general formula of a-b, where a is any | |
| | integer between 1 to 2332 of SEQ ID NO: 32, b is an | |
| | integer of 15 to 2346, where both a and b correspond to the | |
| | positions of nucleotide residues shown in SEQ ID NO: 32, | |
| | and where b is greater than or equal to a + 14. | |
| 554716 | Preferably excluded from the present invention are one or | AA155695 |
| | more polynucleotides comprising a nucleotide sequence | |
| | described by the general formula of a-b, where a is any | |
| | integer between 1 to 445 of SEQ ID NO: 33, b is an integer | |
| | of 15 to 459, where both a and b correspond to the | |
| | positions of nucleotide residues shown in SEQ ID NO: 33, | |
| | and where b is greater than or equal to a + 14. | |
| 556791 | Preferably excluded from the present invention are one or | |
| | more polynucleotides comprising a nucleotide sequence | |
| | described by the general formula of a-b, where a is any | |
| | integer between 1 to 615 of SEQ ID NO: 34, b is an integer | |
| | of 15 to 629, where both a and b correspond to the | |
| | positions of nucleotide residues shown in SEQ ID NO: 34, | |
| | and where b is greater than or equal to a + 14. | |
| 557121 | Preferably excluded from the present invention are one or | R64392, N79271, N93935, W40435, W94836, AA032255, AA033626, |
| | more polynucleotides comprising a nucleotide sequence | AA043229, AA043230, AA150687, AA150859 |
| | described by the general formula of a-b, where a is any | |
| | integer between 1 to 904 of SEQ ID NO: 35, b is an integer | |
| | of 15 to 918, where both a and b correspond to the | |
| | positions of nucleotide residues shown in SEQ ID NO: 35, | |
| | and where b is greater than or equal to a + 14. | |
| 557199 | Preferably excluded from the present invention are one or | |
| | more polynucleotides comprising a nucleotide sequence | |
| | described by the general formula of a-b, where a is any | |
| | integer between 1 to 788 of SEQ ID NO: 36, b is an integer | |
| | of 15 to 802, where both a and b correspond to the | |
| | positions of nucleotide residues shown in SEQ ID NO: 36, | |
| | and where b is greater than or equal to a + 14. | |
| 557293 | Preferably excluded from the present invention are one or | N52364, N75135, N75421, W05142, W07655, AA029997, AA029107, |
| | more polynucleotides comprising a nucleotide sequence | AA463728 |
| | described by the general formula of a-b, where a is any | |
| | integer between 1 to 2079 of SEQ ID NO: 37, b is an | |
| | integer of 15 to 2093, where both a and b correspond to the | |
| | positions of nucleotide residues shown in SEQ ID NO: 37, | |
| | and where b is greater than or equal to a + 14. | |
| 557441 | Preferably excluded from the present invention are one or | |
| | more polynucleotides comprising a nucleotide sequence | |
| | described by the general formula of a-b, where a is any | |
| | integer between 1 to 420 of SEQ ID NO: 38, b is an integer | |
| | of 15 to 434, where both a and b correspond to the | |
| | positions of nucleotide residues shown in SEQ ID NO: 38, | |
| | and where b is greater than or equal to a + 14. | |
| 558091 | Preferably excluded from the present invention are one or | |
| | more polynucleotides comprising a nucleotide sequence | |
| | described by the general formula of a-b, where a is any | |
| | integer between 1 to 1064 of SEQ ID NO: 39, b is an | |
| | integer of 15 to 1078, where both a and b correspond to the | |
| | positions of nucleotide residues shown in SEQ ID NO: 39, | |
| | and where b is greater than or equal to a + 14. | |
| 558423 | Preferably excluded from the present invention are one or | T49968, R56305, H08010, H47549, N29144, N39902, N77470, N78717, |
| | more polynucleotides comprising a nucleotide sequence | AA182657, AA242919, AA252178 |
| | described by the general formula of a-b, where a is any | |
| | integer between 1 to 1962 of SEQ ID NO: 40, b is an | |
| | of 15 to 406, where both a and b correspond to the | |
| | positions of nucleotide residues shown in SEQ ID NO: 42, | |
| | and where b is greater than or equal to a + 14. | |
| 558465 | Preferably excluded from the present invention are one or | T85937, T96679, T96794, R13767, R14771, R38610, R42541, R42541, R60238, |
| | more polynucleotides comprising a nucleotide sequence | R60472, H146363, H14409, R94149, N30062, N30065, N40770, N92651, |
| | described by the general formula of a-b, where a is any | N92649, N99584, N99587, W37817 |
| | integer between 1 to 2296 of SEQ ID NO: 41, b is an | |
| | integer of 15 to 231, where both a and b correspond to the | |
| | positions of nucleotide residues shown in SEQ ID NO: 41, | |
| | and where b is greater than or equal to a + 14. | |
| 558493 | Preferably excluded from the present invention are one or | |
| | more polynucleotides comprising a nucleotide sequence | |
| | described by the general formula of a-b, where a is any | |
| | integer between 1 to 392 of SEQ ID NO: 42, b is an integer | |
| | of 15 to 406, where both a and b correspond to the | |
| | positions of nucleotide residues shown in SEQ ID NO: 42, | |
| | and where b is greater than or equal to a + 14. | |
| 558778 | Preferably excluded from the present invention are one or | |
| | more polynucleotides comprising a nucleotide sequence | |
| | described by the general formula of a-b, where a is any | |
| | integer between 1 to 613 of SEQ ID NO: 43, b is an integer | |
| | of 15 to 627, where both a and b correspond to the | |
| | positions of nucleotide residues shown in SEQ ID NO: 43, | |
| | and where b is greater than or equal to a + 14. | |
| 558818 | Preferably excluded from the present invention are one or | |
| | more polynucleotides comprising a nucleotide sequence | |
| | described by the general formula of a-b, where a is any | |
| | integer between 1 to 731 of SEQ ID NO: 44, b is an integer | |
| | of 15 to 745, where both a and b correspond to the | |
| | positions of nucleotide residues shown in SEQ ID NO: 44, | |
| | and where b is greater than or equal to a + 14. | |
| 563182 | Preferably excluded from the present invention are one or | |
| | more polynucleotides comprising a nucleotide sequence | |
| | described by the general formula of a-b, where a is any | |
| | integer between 1 to 453 of SEQ ID NO: 45, b is an integer | |
| | of 15 to 467, where both a and b correspond to the | |
| | positions of nucleotide residues shown in SEQ ID NO: 45, | |
| | and where b is greater than or equal to a + 14. | |
| 572571 | Preferably excluded from the present invention are one or | R07415, R02207, H14209 |
| | more polynucleotides comprising a nucleotide sequence | |
| | described by the general formula of a-b, where a is any | |
| | integer between 1 to 708 of SEQ ID NO: 46, b is an integer | |
| | of 15 to 722, where both a and b correspond to the | |
| | positions of nucleotide residues shown in SEQ ID NO: 46, | |
| | and where b is greater than or equal to a + 14. | |
| 575525 | Preferably excluded from the present invention are one or | R52330, H20661 |
| | more polynucleotides comprising a nucleotide sequence | |
| | described by the general formula of a-b, where a is any | |
| | integer between 1 to 988 of SEQ ID NO: 47, b is an integer | |
| | of 15 to 1002, where both a and b correspond to the | |
| | positions of nucleotide residues shown in SEQ ID NO: 47, | |
| | and where b is greater than or equal to a + 14. | |
| 580659 | Preferably excluded from the present invention are one or | |
| | more polynucleotides comprising a nucleotide sequence | |
| | described by the general formula of a-b, where a is any | |
| | integer between 1 to 2105 of SEQ ID NO.48, b is an | |
| | integer of 15 to 2119, where both a and b correspond to the | |
| | positions of nucleotide residues shown in SEQ ID NO: 48, | |
| | and where b is greater than or equal to a + 14. | |
| 583650 | Preferably excluded from the present invention are one or | |
| | more polynucleotides comprising a nucleotide sequence | |
| | described by the general formula of a-b, where a is any | |
| | integer between 1 to 480 of SEQ ID NO: 49, b is an integer | |
| | of 15 to 494, where both a and b correspond to the | |
| | positions of nucleotide residues shown in SEQ ID NO: 49, | |
| | and where b is greater than or equal to a + 14. | |
| 584698 | Preferably excluded from the present invention are one or | |
| | more polynucleotides comprising a nucleotide sequence | |
| | described by the general formula of a-b, where a is any | |
| | integer between 1 to 1328 of SEQ ID NO: 50, b is an | |
| | integer of 15 to 1342, where both a and b correspond to the | |
| | positions of nucleotide residues shown in SEQ ID NO: 50, | |
| | and where b is greater than or equal to a + 14. | |
| 585791 | Preferably excluded from the present invention are one or | T48321, T67802, T67948, T67040, T67041, T83908, R09529, R09642, |
| | more polynucleotides comprising a nucleotide sequence | T83737, R16473, R16773, R25443, R26269, H05343, H26912, H28048, |
| | described by the general formula of a-b, where a is any | H39855, R86113, N33097, N44668, N79489, W16656, W60696, W60757, |
| | integer between 1 to 1513 of SEQ ID NO: 51, b is an | AA081126, AA081151, AA083763, AA132950, AA132862, AA149302, |
| | integer of 15 to 1527, where both a and b correspond to the | AA149416, AA191527, AA194936, AA195535, AA233905, AA234134 |
| | positions of nucleotide residues shown in SEQ ID NO: 51, | |
| | and where b is greater than or equal to a + 14. | |
| 587229 | Preferably excluded from the present invention are one or | |
| | more polynucleotides comprising a nucleotide sequence | |
| | described by the general formula of a-b, where a is any | |
| | integer between 1 to 616 of SEQ ID NO: 52, b is an integer | |
| | of 15 to 630, where both a and b correspond to the | |
| | positions of nucleotide residues shown in SEQ ID NO: 52, | |
| | and where b is greater than or equal to a + 14. | |
| 587246 | Preferably excluded from the present invention are one or | |
| | more polynucleotides comprising a nucleotide sequence | |
| | described by the general formula of a-b, where a is any | |
| | integer between 1 to 561 of SEQ ID NO: 53, b is an integer | |
| | of 15 to 575, where both a and b correspond to the | |
| | positions of nucleotide residues shown in SEQ ID NO: 53, | |
| | and where b is greater than or equal to a + 14. | |
| 587486 | Preferably excluded from the present invention are one or | T71052, T71121, T72185, R21828, R21895, N51506, N53649, N66770, |
| | more polynucleotides comprising a nucleotide sequence | W72635, W77877, AA063260, AA083833, AA165549, AA165652, |
| | described by the general formula of a-b, where a is any | AA169616, AA256205, AA256348, AA464908 |
| | integer between 1 to 2920 of SEQ ID NO: 54, b is an | |
| | integer of 15 to 2934, where both a and b correspond to the | |
| | positions of nucleotide residues shown in SEQ ID NO: 54, | |
| | and where b is greater than or equal to a + 14. | |
| 589218 | Preferably excluded from the present invention are one or | R31110, N36905, N36910, N48189, W32216, AA069678, AA173954 |
| | more polynucleotides comprising a nucleotide sequence | |
| | described by the general formula of a-b, where a is any | |
| | integer between 1 to 561 of SEQ ID NO: 55, b is an integer | |
| | of 15 to 575, where both a and b correspond to the | |
| | positions of nucleotide residues shown in SEQ ID NO: 55, | |
| | and where b is greater than or equal to a + 14. | |
| 592154 | Preferably excluded from the present invention are one or | R12094, T66653, T80236, R15999, R25029, R35910, AA194354 |
| | more polynucleotides comprising a nucleotide sequence | |
| | described by the general formula of a-b, where a is any | |
| | integer between 1 to 1126 of SEQ ID NO: 56, b is an | |
| | integer of 15 to 1140, where both a and b correspond to the | |
| | positions of nucleotide residues shown in SEQ ID NO: 56, | |
| | and where b is greater than or equal to a + 14. | |
| 598664 | Preferably excluded from the present invention are one or | W40222 |
| | more polynucleotides comprising a nucleotide sequence | |
| | described by the general formula of a-b, where a is any | |
| | integer between 1 to 241 of SEQ ID NO: 57, b is an integer | |
| | of 15 to 255, where both a and b correspond to the | |
| | positions of nucleotide residues shown in SEQ ID NO: 57, | |
| | and where b is greater than or equal to a + 14. | |
| 598665 | Preferably excluded from the present invention are one or | W39277, W39349, W39357, W39764, W39767, W40288, W40538, W44820, |
| | more polynucleotides comprising a nucleotide sequence | W45264, W51936, W51937, W51918, W52848, W74327 |
| | described by the general formula of a-b, where a is any | |
| | integer between 1 to 1240 of SEQ ID NO: 58, b is an | |
| | integer of 15 to 1254, where both a and b correspond to the | |
| | positions of nucleotide residues shown in SEQ ID NO: 58, | |
| | and where b is greater than or equal to a + 14. | |
| 604719 | Preferably excluded from the present invention are one or | T49228, T49490, T70505, T70428, T73981, T86568, T86746, T91867, |
| | more polynucleotides comprising a nucleotide sequence | R10309, R12088, T79988, T80222, T84402, T85263, T85576, T85577, |
| | described by the general formula of a-b, where a is any | R05432, R13226, R13278, R13833, R18842, R19462, R21598, R22718, |
| | integer between 1 to 1176 of SEQ ID NO: 59, b is an | R35298, H10723, H11136, H44767, R88961, R92868, R92897, R97874, |
| | integer of 15 to 1190, where both a and b correspond to the | H71254, H71922, H78937, H79825, H79920, H80125, H86893, H90187, |
| | positions of nucleotide residues shown in SEQ ID NO: 59, | N25116, N44644, N50007, N53591, N72554, W40421, W42525, W52370, |
| | and where b is greater than or equal to a + 14. | AA021224, AA037505, AA053988 |
| 612689 | Preferably excluded from the present invention are one or | H54589, AA227410 |
| | more polynucleotides comprising a nucleotide sequence | |
| | described by the general formula of a-b, where a is any | |
| | integer between 1 to 566 of SEQ ID NO: 60, b is an integer | |
| | of 15 to 580, where both a and b correspond to the | |
| | positions of nucleotide residues shown in SEQ ID NO: 60, | |
| | and where b is greater than or equal to a + 14. | |
| 612980 | Preferably excluded from the present invention are one or | |
| | more polynucleotides comprising a nucleotide sequence | |
| | described by the general formula of a-b, where a is any | |
| | integer between 1 to 439 of SEQ ID NO: 61, b is an integer | |
| | of 15 to 453, where both a and b correspond to the | |
| | positions of nucleotide residues shown in SEQ ID NO: 61, | |
| | and where b is greater than or equal to a + 14. | |
| 615134 | Preferably excluded from the present invention are one or | T54861, T55025, T92712, T92716, T92721, T92789, T92795, T92801, |
| | more polynucleotides comprising a nucleotide sequence | T92938, T93055, T93331, T94009, R15352, R25472, R26297, R33615, |
| | described by the general formula of a-b, where a is any | R33726, R53088, R62766, R62767, R71478, R71526, R78919, R79016, |
| | integer between 1 to 2579 of SEQ ID NO: 62, b is an | H06272, H06317, H24935, H24973, H28559, H28560, H42644, H38452, |
| | integer of 15 to 2593, where both a and b correspond to the | H38491, H47593, H47673, R87481, R88156, R89767, R89789, H51597, |
| | positions of nucleotide residues shown in SEQ ID NO: 62, | H57134, H57205, H62215, H62312, H97605, N24503, N27658, N35013, |
| | and where b is greater than or equal to a + 14. | N43767, N92918, W15223, W39515, W72421, W76280, W86384, AA031688, |
| | | AA031689, AA036840, AA045285, AA046566, AA099284, AA132058, |
| | | AA132202, AA150688, AA150860, AA156675, AA159469, AA160880, |
| | | AA165451, AA165638, AA173528, AA173712, AA458903, AA459097 |
| 616064 | Preferably excluded from the present invention are one or | |
| | more polynucleotides comprising a nucleotide sequence | |
| | described by the general formula of a-b, where a is any | |
| | integer between 1 to 1181 of SEQ ID NO: 63, b is an | |
| | integer of 15 to 1195, where both a and b correspond to the | |
| | positions of nucleotide residues shown in SEQ ID NO: 63, | |
| | and where b is greater than or equal to a + 14. | |
| 616096 | Preferably excluded from the present invention are one or | |
| | more polynucleotides comprising a nucleotide sequence | |
| | described by the general formula of a-b, where a is any | |
| | integer between 1 to 378 of SEQ ID NO: 64, b is an integer | |
| | of 15 to 392, where both a and b correspond to the | |
| | positions of nucleotide residues shown in SEQ ID NO: 64, | |
| | and where b is greater than or equal to a + 14. | |
| 616926 | Preferably excluded from the present invention are one or | AA149936, AA150476, AA167701, AA167815, AA256842, AA256431, |
| | more polynucleotides comprising a nucleotide sequence | AA458750 |
| | described by the general formula of a-b, where a is any | |
| | integer between 1 to 1276 of SEQ ID NO: 65, b is an | |
| | integer of 15 to 1290, where both a and b correspond to the | |
| | positions of nucleotide residues shown in SEQ ID NO: 65, | |
| | and where b is greater than or equal to a + 14. | |
| 634923 | Preferably excluded from the present invention are one or | |
| | more polynucleotides comprising a nucleotide sequence | |
| | described by the general formula of a-b, where a is any | |
| | integer between 1 to 702 of SEQ ID NO: 66, b is an integer | |
| | of 15 to 716, where both a and b correspond to the | |
| | positions of nucleotide residues shown in SEQ ID NO: 66, | |
| | and where b is greater than or equal to a + 14. | |
| 646688 | Preferably excluded from the present invention are one or | |
| | more polynucleotides comprising a nucleotide sequence | |
| | described by the general formula of a-b, where a is any | |
| | integer between 1 to 1112 of SEQ ID NO: 67, b is an | |
| | integer of 15 to 1126, where both a and b correspond to the | |
| | positions of nucleotide residues shown in SEQ ID NO: 67, | |
| | and where b is greater than or equal to a + 14. | |
| 647531 | Preferably excluded from the present invention are one or | |
| | more polynucleotides comprising a nucleotide sequence | |
| | described by the general formula of a-b, where a is any | |
| | integer between 1 to 2125 of SEQ ID NO: 68, b is an | |
| | integer of 15 to 2139, where both a and b correspond to the | |
| | positions of nucleotide residues shown in SEQ ID NO: 68, | |
| | and where b is greater than or equal to a + 14. | |
| 647695 | Preferably excluded from the present invention are one or | W52753, W60008, W60952, W73125 |
| | more polynucleotides comprising a nucleotide sequence | |
| | described by the general formula of a-b, where a is any | |
| | integer between 1 to 1327 of SEQ ID NO: 69, b is an | |
| | integer of 15 to 1341, where both a and b correspond to the | |
| | positions of nucleotide residues shown in SEQ ID NO: 69, | |
| | and where b is greater than or equal to a + 14. | |
| 647699 | Preferably excluded from the present invention are one or | |
| | more polynucleotides comprising a nucleotide sequence | |
| | described by the general formula of a-b, where a is any | |
| | integer between 1 to 721 of SEQ ID NO: 70, b is an integer | |
| | of 15 to 735, where both a and b correspond to the | |
| | positions of nucleotide residues shown in SEQ ID NO: 70, | |
| | and where b is greater than or equal to a + 14. | |
| 651706 | Preferably excluded from the present invention are one or | T71695, T71768, R08204, R08255, R31484, R31485, R50842, R52642, |
| | more polynucleotides comprising a nucleotide sequence | R53297, R60059, R60122, R60247, R60760, R62567, R62568, R70726, |
| | described by the general formula of a-b, where a is any | R71415, H38156, R83081, R94374, R94394, H53235, H60439, H60485, |
| | integer between 1 to 2016 of SEQ ID NO: 71, b is an | H63520, H63921, H64892, H65484, H71929, H77840, H77887, H78275, |
| | integer of 15 to 2030, where both a and b correspond to the | H79162, H80573, H94710, H95076, H95259, H95309, N46854, N47172, |
| | positions of nucleotide residues shown in SEQ ID NO: 71, | N49873, W55275, N64845, N68747, N74193, N74236, N91640, W01175, |
| | and where b is greater than or equal to a + 14. | W01240, W57593, AA129298, AA129339, AA133183, AA133370 |
| 651726 | Preferably excluded from the present invention are one or | T90733, R10849, R10850, T82138, T83264, R87054, R91713, H71337, |
| | more polynucleotides comprising a nucleotide sequence | H71389, H72382, N55250, N74908, N76660, N76857, W20174, W23436, |
| | described by the general formula of a-b, where a is any | W35129, AA045320, AA045221 |
| | integer between 1 to 1861 of SEQ ID NO: 72, b is an | |
| | integer of 15 to 1875, where both a and b correspond to the | |
| | positions of nucleotide residues shown in SEQ ID NO: 72, | |
| | and where b is greater than or equal to a + 14. | |
| 652160 | Preferably excluded from the present invention are one or | |
| | more polynucleotides comprising a nucleotide sequence | |
| | described by the general formula of a-b, where a is any | |
| | integer between 1 to 846 of SEQ ID NO: 73, b is an integer | |
| | of 15 to 860, where both a and b correspond to the | |
| | positions of nucleotide residues shown in SEQ ID NO: 73, | |
| | and where b is greater than or equal to a + 14. | |
| 654015 | Preferably excluded from the present invention are one or | |
| | more polynucleotides comprising a nucleotide sequence | |
| | described by the general formula of a-b, where a is any | |
| | integer between 1 to 506 of SEQ ID NO: 74, b is an integer | |
| | of 15 to 520, where both a and b correspond to the | |
| | positions of nucleotide residues shown in SEQ ID NO: 74, | |
| | and where b is greater than or equal to a + 14. | |
| 656339 | Preferably excluded from the present invention are one or | H70078 |
| | more polynucleotides comprising a nucleotide sequence | |
| | described by the general formula of a-b, where a is any | |
| | integer between 1 to 849 of SEQ ID NO: 75, b is an integer | |
| | of 15 to 863, where both a and b correspond to the | |
| | positions of nucleotide residues shown in SEQ ID NO: 75, | |
| | and where b is greater than or equal to a + 14. | |
| 657190 | Preferably excluded from the present invention are one or | |
| | more polynucleotides comprising a nucleotide sequence | |
| | described by the general formula of a-b, where a is any | |
| | integer between 1 to 677 of SEQ ID NO: 76, b is an integer | |
| | of 15 to 691, where both a and b correspond to the | |
| | positions of nucleotide residues shown in SEQ ID NO: 76, | |
| | and where b is greater than or equal to a + 14. | |
| 657859 | Preferably excluded from the present invention are one or | |
| | more polynucleotides comprising a nucleotide sequence | |
| | described by the general formula of a-b, where a is any | |
| | integer between 1 to 311 of SEQ ID NO: 77, b is an integer | |
| | of 15 to 325, where both a and b correspond to the | |
| | positions of nucleotide residues shown in SEQ ID NO: 77, | |
| | and where b is greater than or equal to a + 14. | |
| 662143 | Preferably excluded from the present invention are one or | R27497, R33219, R94577, N95517 |
| | more polynucleotides comprising a nucleotide sequence | |
| | described by the general formula of a-b, where a is any | |
| | integer between 1 to 807 of SEQ ID NO: 78, b is an integer | |
| | of 15 to 821, where both a and b correspond to the | |
| | positions of nucleotide residues shown in SEQ ID NO: 78, | |
| | and where b is greater than or equal to a + 14. | |
| 662212 | Preferably excluded from the present invention are one or | |
| | more polynucleotides comprising a nucleotide sequence | |
| | described by the general formula of a-b, where a is any | |
| | integer between 1 to 603 of SEQ ID NO: 79, b is an integer | |
| | of 15 to 617, where both a and b correspond to the | |
| | positions of nucleotide residues shown in SEQ ID NO: 79, | |
| | and where b is greater than or equal to a + 14. | |
| 662225 | Preferably excluded from the present invention are one or | R59488, H11016, N29502, AA025624 |
| | more polynucleotides comprising a nucleotide sequence | |
| | described by the general formula of a-b, where a is any | |
| | integer between 1 to 1175 of SEQ ID NO: 80, b is an | |
| | integer of 15 to 1189, where both a and b correspond to the | |
| | positions of nucleotide residues shown in SEQ ID NO: 80, | |
| | and where b is greater than or equal to a + 14. | |
| 662496 | Preferably excluded from the present invention are one or | |
| | more polynucleotides comprising a nucleotide sequence | |
| | described by the general formula of a-b, where a is any | |
| | integer between 1 to 452 of SEQ ID NO: 81, b is an integer | |
| | of 15 to 466, where both a and b correspond to the | |
| | positions of nucleotide residues shown in SEQ ID NO: 81, | |
| | and where b is greater than or equal to a + 14. | |
| 669529 | Preferably excluded from the present invention are one or | |
| | more polynucleotides comprising a nucleotide sequence | |
| | described by the general formula of a-b, where a is any | |
| | integer between 1 to 346 of SEQ ID NO: 82, b is an integer | |
| | of 15 to 360, where both a and b correspond to the | |
| | positions of nucleotide residues shown in SEQ ID NO: 82, | |
| | and where b is greater than or equal to a + 14. | |
| 670453 | Preferably excluded from the present invention are one or | T77608, R09248, R09364, R11470, R19371, R39244, H15039, H15949, |
| | more polynucleotides comprising a nucleotide sequence | H27001, H30603, H37983, R84579, R85044, R85045, R85469, H85744, |
| | described by the general formula of a-b, where a is any | H99185, N24468, N52798, N68992, N76620, W15294, W39329, W52841, |
| | integer between 1 to 2095 of SEQ ID NO: 83, b is an | W95437, W95781, AA057725, AA059439 |
| | integer of 15 to 2109, where both a and b correspond to the | |
| | positions of nucleotide residues shown in SEQ ID NO: 83, | |
| | and where b is greater than or equal to a + 14. | |
| 675028 | Preferably excluded from the present invention are one or | T48289, T77554, R05507, R25405, R31496, R32660, R41978, R41978, |
| | more polynucleotides comprising a nucleotide sequence | R62600, R62648, R63390, R63445, R68659, R68711, R68771, R68865, |
| | described by the general formula of a-b, where a is any | H01655, H01656, H04239, R92875, R93091, H83742, H83886, H89969, |
| | integer between 1 to 1521 of SEQ ID NO: 84, b is an | N30705, N64395, N64408, N66492, N67310, N68265, N80959, N92190, |
| | integer of 15 to 1535, where both a and b correspond to the | W79008, W80400, N90831, AA075349, AA075461, AA224356 |
| | positions of nucleotide residues shown in SEQ ID NO: 84, | |
| | and where b is greater than or equal to a + 14. | |
| 681325 | Preferably excluded from the present invention are one or | |
| | more polynucleotides comprising a nucleotide sequence | |
| | described by the general formula of a-b, where a is any | |
| | integer between 1 to 417 of SEQ ID NO: 85, b is an integer | |
| | of 15 to 431, where both a and b correspond to the | |
| | positions of nucleotide residues shown in SEQ ID NO: 85, | |
| | and where b is greater than or equal to a + 14. | |
| 683103 | Preferably excluded from the present invention are one or | |
| | more polynucleotides comprising a nucleotide sequence | |
| | described by the general formula of a-b, where a is any | |
| | integer between 1 to 1128 of SEQ ID NO: 86, b is an | |
| | integer of 15 to 1142, where both a and b correspond to the | |
| | positions of nucleotide residues shown in SEQ ID NO: 86, | |
| | and where b is greater than or equal to a + 14. | |
| 684432 | Preferably excluded from the present invention are one or | R52639, R53294, R71671, R71703, H40352, H40408, R96789, R97034, |
| | more polynucleotides comprising a nucleotide sequence | R97271, R97719, H49468, H49467, H56659, H56739, H59341, H59998, |
| | described by the general formula of a-b, where a is any | H63308, H93861, H94642, H94643, N30295, N31741, N31742, N42019, |
| | integer between 1 to 1783 of SEQ ID NO: 87, b is an | N42450, N53570, N53844, N63677, N64865, N70725, N72529, N73341, |
| | integer of 15 to 1797, where both a and b correspond to the | N92110, N92116, N99031, W16862, W39154, W86457, N89634, AA005356, |
| | positions of nucleotide residues shown in SEQ ID NO: 87, | AA007379, AA235011, AA236270, AA253267 |
| | and where b is greater than or equal to a + 14. | |
| 688018 | Preferably excluded from the present invention are one or | T54297 |
| | more polynucleotides comprising a nucleotide sequence | |
| | described by the general formula of a-b, where a is any | |
| | integer between 1 to 367 of SEQ ID NO: 88, b is an integer | |
| | of 15 to 381, where both a and b correspond to the | |
| | positions of nucleotide residues shown in SEQ ID NO: 88, | |
| | and where b is greater than or equal to a + 14. | |
| 688077 | Preferably excluded from the present invention are one or | H00845, H01228, R95095, N76784, N98607, W24232, W52082, W56721, |
| | more polynucleotides comprising a nucleotide sequence | W56767, W67714, W68173, W90739, W90774, AA033634, AA034341, |
| | described by the general formula of a-b, where a is any | A062620, AA062994, AA258212 |
| | integer between 1 to 524 of SEQ ID NO: 89, b is an integer | |
| | of 15 to 538, where both a and b correspond to the | |
| | positions of nucleotide residues shown in SEQ ID NO: 89, | |
| | and where b is greater than or equal to a + 14. | |
| 691522 | Preferably excluded from the present invention are one or | |
| | more polynucleotides comprising a nucleotide sequence | |
| | described by the general formula of a-b, where a is any | |
| | integer between 1 to 2107 of SEQ ID NO: 90, b is an | |
| | integer of 15 to 2121, where both a and b correspond to the | |
| | positions of nucleotide residues shown in SEQ ID NO: 90, | |
| | and where b is greater than or equal to a + 14. | |
| 693706 | Preferably excluded from the present invention are one or | T78218, T81634, R13915, R18080, H18055, H63131, H67579, AA035361, |
| | more polynucleotides comprising a nucleotide sequence | AA069801, AA069848, AA076182, AA079495, AA082095, AA102007, |
| | described by the general formula of a-b, where a is any | AA100775, AA143208, AA143346, AA146711, AA147300, AA180012, |
| | integer between 1 to 2960 of SEQ ID NO: 91, b is an | AA235098 |
| | integer of 15 to 2974, where both a and b correspond to the | |
| | positions of nucleotide residues shown in SEQ ID NO: 91, | |
| | and where b is greater than or equal to a + 14. | |
| 694523 | Preferably excluded from the present invention are one or | |
| | more polynucleotides comprising a nucleotide sequence | |
| | described by the general formula of a-b, where a is any | |
| | integer between 1 to 398 of SEQ ID NO: 92, b is an integer | |
| | of 15 to 412, where both a and b correspond to the | |
| | positions of nucleotide residues shown in SEQ ID NO: 92, | |
| | and where b is greater than or equal to a + 14. | |
| 697517 | Preferably excluded from the present invention are one or | T90609, AA053480, AA074689, AA102775, AA122090, AA182511, |
| | more polynucleotides comprising a nucleotide sequence | AA243116 |
| | described by the general formula of a-b, where a is any | |
| | integer between 1 to 1869 of SEQ ID NO: 93, b is an | |
| | integer of 15 to 1883, where both a and b correspond to the | |
| | positions of nucleotide residues shown in SEQ ID NO: 93, | |
| | and where b is greater than or equal to a + 14. | |
| 699054 | Preferably excluded from the present invention are one or | |
| | more polynucleotides comprising a nucleotide sequence | |
| | described by the general formula of a-b, where a is any | |
| | integer between 1 to 2297 of SEQ ID NO: 94, b is an | |
| | integer of 15 to 2311, where both a and b correspond to the | |
| | positions of nucleotide residues shown in SEQ ID NO: 94, | |
| | and where b is greater than or equal to a + 14. | |
| 699464 | Preferably excluded from the present invention are one or | T82960 |
| | more polynucleotides comprising a nucleotide sequence | |
| | described by the general formula of a-b, where a is any | |
| | integer between 1 to 500 of SEQ ID NO: 95, b is an integer | |
| | of 15 to 514, where both a and b correspond to the | |
| | positions of nucleotide residues shown in SEQ ID NO: 95, | |
| | and where b is greater than or equal to a + 14. | |
| 703402 | Preferably excluded from the present invention are one or | |
| | more polynucleotides comprising a nucleotide sequence | |
| | described by the general formula of a-b, where a is any | |
| | integer between 1 to 451 of SEQ ID NO: 96, b is an integer | |
| | of 15 to 465, where both a and b correspond to the | |
| | positions of nucleotide residues shown in SEQ ID NO: 96, | |
| | and where b is greater than or equal to a + 14. | |
| 703651 | Preferably excluded from the present invention are one or | |
| | more polynucleotides comprising a nucleotide sequence | |
| | described by the general formula of a-b, where a is any | |
| | integer between 1 to 1445 of SEQ ID NO: 97, b is an | |
| | integer of 15 to 1459, where both a and b correspond to the | |
| | positions of nucleotide residues shown in SEQ ID NO: 97, | |
| | and where b is greater than or equal to a + 14. | |
| 704905 | Preferably excluded from the present invention are one or | |
| | more polynucleotides comprising a nucleotide sequence | |
| | described by the general formula of a-b, where a is any | |
| | integer between 1 to 865 of SEQ ID NO: 98, b is an integer | |
| | of 15 to 879, where both a and b correspond to the | |
| | positions of nucleotide residues shown in SEQ ID NO: 98, | |
| | and where b is greater than or equal to a + 14. | |
| 706907 | Preferably excluded from the present invention are one or | |
| | more polynucleotides comprising a nucleotide sequence | |
| | described by the general formula of a-b, where a is any | |
| | integer between 1 to 234 of SEQ ID NO: 99, b is an integer | |
| | of 15 to 248, where both a and b correspond to the | |
| | positions of nucleotide residues shown in SEQ ID NO: 99, | |
| | and where b is greater than or equal to a + 14. | |
| 708515 | Preferably excluded from the present invention are one or | R35145, H20357, H25361, H40070, N24435, N56688, W92201, AA164775 |
| | more polynucleotides comprising a nucleotide sequence | |
| | described by the general formula of a-b, where a is any | |
| | integer between 1 to 466 of SEQ ID NO: 100, b is an | |
| | integer of 15 to 480, where both a and b correspond to the | |
| | positions of nucleotide residues shown in SEQ ID NO: 100, | |
| | and where b is greater than or equal to a + 14. | |
| 710572 | Preferably excluded from the present invention are one or | AA188988, AA188989 |
| | more polynucleotides comprising a nucleotide sequence | |
| | described by the general formula of a-b, where a is any | |
| | integer between 1 to 439 of SEQ ID NO: 101, b is an | |
| | integer of 15 to 453, where both a and b correspond to the | |
| | positions of nucleotide residues shown in SEQ ID NO: 101, | |
| | and where b is greater than or equal to a + 14. | |
| 710618 | Preferably excluded from the present invention are one or | T92687, N50744 |
| | more polynucleotides comprising a nucleotide sequence | |
| | described by the general formula of a-b, where a is any | |
| | integer between 1 to 889 of SEQ ID NO: 102, b is an | |
| | integer of 15 to 903, where both a and b correspond to the | |
| | positions of nucleotide residues shown in SEQ ID NO: 102, | |
| | and where b is greater than or equal to a + 14. | |
| 711810 | Preferably excluded from the present invention are one or | |
| | more polynucleotides comprising a nucleotide sequence | |
| | described by the general formula of a-b, where a is any | |
| | integer between 1 to 1774 of SEQ ID NO: 103, b is an | |
| | integer of 15 to 1788, where both a and b correspond to the | |
| | positions of nucleotide residues shown in SEQ ID NO: 103, | |
| | and where b is greater than or equal to a + 14. | |
| 714933 | Preferably excluded from the present invention are one or | T65559, T65626, R10350, R13281, R13569, R14670, R15257, R34544, |
| | more polynucleotides comprising a nucleotide sequence | R36053, R39872, R40726, R49062, R49135, R53355, R53957, R49062, |
| | described by the general formula of a-b, where a is any | R49135, R40726, R78042, H05306, H05356, H07035, H10902, H14308, |
| | integer between 1 to 3305 of SEQ ID NO: 104, b is an | H24047, H24154, R89696, R93433, R98651, R98650, H50887, H53389, |
| | integer of 15 to 3319, where both a and b correspond to the | H91935, H91944, H99472, N25040, N26192, N28285, N48283, N49011, |
| | positions of nucleotide residues shown in SEQ ID NO: 104, | N62360, N68609, N71824, N79127, W72510, W76067, W94862, W94822, |
| | and where b is greater than or equal to a + 14. | W96008, W96040, AA025005, AA036767, AA044132, AA044098, |
| | | AA047829, AA047855, AA054452, AA054567, AA057171, AA085624, |
| | | AA088811, AA130768, AA130944, AA132373, AA132618, AA150892, |
| | | AA151019, AA157288, AA157368, AA157369, AA159896, AA160826, |
| | | AA180535, AA187424, AA187614 |
| 716331 | Preferably excluded from the present invention are one or | |
| | more polynucleotides comprising a nucleotide sequence | |
| | described by the general formula of a-b, where a is any | |
| | integer between 1 to 1972 of SEQ ID NO: 105, b is an | |
| | integer of 15 to 1986, where both a and b correspond to the | |
| | positions of nucleotide residues shown in SEQ ID NO: 105, | |
| | and where b is greater than or equal to a + 14. | |
| 717686 | Preferably excluded from the present invention are one or | |
| | more polynucleotides comprising a nucleotide sequence | |
| | described by the general formula of a-b, where a is any | |
| | integer between 1 to 577 of SEQ ID NO: 106, b is an | |
| | integer of 15 to 591, where both a and b correspond to the | |
| | positions of nucleotide residues shown in SEQ ID NO: 106, | |
| | and where b is greater than or equal to a + 14. | |
| 718187 | Preferably excluded from the present invention are one or | |
| | more polynucleotides comprising a nucleotide sequence | |
| | described by the general formula of a-b, where a is any | |
| | integer between 1 to 139 of SEQ ID NO: 107, b is an | |
| | integer of 15 to 153, where both a and b correspond to the | |
| | positions of nucleotide residues shown in SEQ ID NO: 107, | |
| | and where b is greater than or equal to a + 14. | |
| 719934 | Preferably excluded from the present invention are one or | |
| | more polynucleotides comprising a nucleotide sequence | |
| | described by the general formula of a-b, where a is any | |
| | integer between 1 to 1522 of SEQ ID NO: 108, b is an | |
| | integer of 15 to 1536, where both a and b correspond to the | |
| | positions of nucleotide residues shown in SEQ ID NO: 108, | |
| | and where b is greater than or equal to a + 14. | |
| 722980 | Preferably excluded from the present invention are one or | |
| | more polynucleotides comprising a nucleotide sequence | |
| | described by the general formula of a-b, where a is any | |
| | integer between 1 to 498 of SEQ ID NO: 109, b is an | |
| | integer of 15 to 512, where both a and b correspond to the | |
| | positions of nucleotide residues shown in SEQ ID NO: 109, | |
| | and where b is greater than or equal to a + 14. | |
| 723596 | Preferably excluded from the present invention are one or | W90706, W95592, AA047652, AA250970, AA250874, AA251071, |
| | more polynucleotides comprising a nucleotide sequence | AA251074, AA251073 |
| | described by the general formula of a-b, where a is any | |
| | integer between 1 to 1441 of SEQ ID NO: 110, b is an | |
| | integer of 15 to 1455, where both a and b correspond to the | |
| | positions of nucleotide residues shown in SEQ ID NO: 110, | |
| | and where b is greater than or equal to a + 14. | |
| 724352 | Preferably excluded from the present invention are one or | |
| | more polynucleotides comprising a nucleotide sequence | |
| | described by the general formula of a-b, where a is any | |
| | integer between 1 to 661 of SEQ ID NO: 111, b is an | |
| | integer of 15 to 675, where both a and b correspond to the | |
| | positions of nucleotide residues shown in SEQ ID NO: 111, | |
| | and where b is greater than or equal to a + 14. | |
| 724450 | Preferably excluded from the present invention are one or | |
| | more polynucleotides comprising a nucleotide sequence | |
| | described by the general formula of a-b, where a is any | |
| | integer between 1 to 534 of SEQ ID NO: 112, b is an | |
| | integer of 15 to 548, where both a and b correspond to the | |
| | positions of nucleotide residues shown in SEQ ID NO: 112, | |
| | and where b is greater than or equal to a + 14. | |
| 724855 | Preferably excluded from the present invention are one or | T77137, T88762, T99291, R07006, AA004532 |
| | more polynucleotides comprising a nucleotide sequence | |
| | described by the general formula of a-b, where a is any | |
| | integer between 1 to 462 of SEQ ID NO: 113, b is an | |
| | integer of 15 to 476, where both a and b correspond to the | |
| | positions of nucleotide residues shown in SEQ ID NO: 113, | |
| | and where b is greater than or equal to a + 14. | |
| 724904 | Preferably excluded from the present invention are one or | |
| | more polynucleotides comprising a nucleotide sequence | |
| | described by the general formula of a-b, where a is any | |
| | integer between 1 to 1002 of SEQ ID NO: 114, b is an | |
| | integer of 15 to 1016, where both a and b correspond to the | |
| | positions of nucleotide residues shown in SEQ ID NO: 114, | |
| | and where b is greater than or equal to a + 14. | |
| 725642 | Preferably excluded from the present invention are one or | |
| | more polynucleotides comprising a nucleotide sequence | |
| | described by the general formula of a-b, where a is any | |
| | integer between 1 to 480 of SEQ ID NO: 115, b is an | |
| | integer of 15 to 494, where both a and b correspond to the | |
| | positions of nucleotide residues shown in SEQ ID NO: 115, | |
| | and where b is greater than or equal to a + 14. | |
| 726192 | Preferably excluded from the present invention are one or | T65882, T66040, T77662, R53239, R59914, R59915, R62156, R62264, |
| | more polynucleotides comprising a nucleotide sequence | R63487, H04945, H04951, H13535, H13536, H16274, N25318, N25787, |
| | described by the general formula of a-b, where a is any | N31430, N32153, N36498, N49086, N49333, N50212, N66885, N78949, |
| | integer between 1 to 3222 of SEQ ID NO: 116, b is an | AA115267, AA115291, AA150461, AA164418, AA195130, AA195277, |
| | integer of 15 to 3236, where both a and b correspond to the | AA234969, AA236191, AA251324, AA251530, AA251517, AA258562, |
| | positions of nucleotide residues shown in SEQ ID NO: 116, | AA258724 |
| | and where b is greater than or equal to a + 14. | |
| 726964 | Preferably excluded from the present invention are one or | |
| | more polynucleotides comprising a nucleotide sequence | |
| | described by the general formula of a-b, where a is any | |
| | integer between 1 to 897 of SEQ ID NO: 117, b is an | |
| | integer of 15 to 911, where both a and b correspond to the | |
| | positions of nucleotide residues shown in SEQ ID NO: 117, | |
| | and where b is greater than or equal to a + 14. | |
| 730930 | Preferably excluded from the present invention are one or | |
| | more polynucleotides comprising a nucleotide sequence | |
| | described by the general formula of a-b, where a is any | |
| | integer between 1 to 1963 of SEQ ID NO: 118, b is an | |
| | integer of 15 to 1977, where both a and b correspond to the | |
| | positions of nucleotide residues shown in SEQ ID NO: 118, | |
| | and where b is greater than or equal to a + 14. | |
| 731314 | Preferably excluded from the present invention are one or | R32598, R36499 |
| | more polynucleotides comprising a nucleotide sequence | |
| | described by the general formula of a-b, where a is any | |
| | integer between 1 to 790 of SEQ ID NO: 119, b is an | |
| | integer of 15 to 804, where both a and b correspond to the | |
| | positions of nucleotide residues shown in SEQ ID NO: 119, | |
| | and where b is greater than or equal to a + 14. | |
| 732386 | Preferably excluded from the present invention are one or | AA417877, AA424537, AA424604 |
| | more polynucleotides comprising a nucleotide sequence | |
| | described by the general formula of a-b, where a is any | |
| | integer between 1 to 723 of SEQ ID NO: 120, b is an | |
| | integer of 15 to 737, where both a and b correspond to the | |
| | positions of nucleotide residues shown in SEQ ID NO: 120, | |
| | and where b is greater than or equal to a + 14. | |
| 732909 | Preferably excluded from the present invention are one or | |
| | more polynucleotides comprising a nucleotide sequence | |
| | described by the general formula of a-b, where a is any | |
| | integer between 1 to 1238 of SEQ ID NO: 121, b is an | |
| | integer of 15 to 1252, where both a and b correspond to the | |
| | positions of nucleotide residues shown in SEQ ID NO: 121, | |
| | and where b is greater than or equal to a + 14. | |
| 733088 | Preferably excluded from the present invention are one or | |
| | more polynucleotides comprising a nucleotide sequence | |
| | described by the general formula of a-b, where a is any | |
| | integer between 1 to 1834 of SEQ ID NO: 122, b is an | |
| | integer of 15 to 1848, where both a and b correspond to the | |
| | positions of nucleotide residues shown in SEQ ID NO: 122, | |
| | and where b is greater than or equal to a + 14. | |
| 733351 | Preferably excluded from the present invention are one or | |
| | more polynucleotides comprising a nucleotide sequence | |
| | described by the general formula of a-b, where a is any | |
| | integer between 1 to 449 of SEQ ID NO: 123, b is an | |
| | integer of 15 to 463, where both a and b correspond to the | |
| | positions of nucleotide residues shown in SEQ ID NO: 123, | |
| | and where b is greater than or equal to a + 14. | |
| 733693 | Preferably excluded from the present invention are one or | |
| | more polynucleotides comprising a nucleotide sequence | |
| | described by the general formula of a-b, where a is any | |
| | integer between 1 to 336 of SEQ ID NO: 124, b is an | |
| | integer of 15 to 350, where both a and b correspond to the | |
| | positions of nucleotide residues shown in SEQ ID NO: 124, | |
| | and where b is greater than or equal to a + 14. | |
| 734760 | Preferably excluded from the present invention are one or | T78350, T79874, R13714, H83297, H86534, N20546, N93623, N93932, |
| | more polynucleotides comprising a nucleotide sequence | W23965, AA016035, AA016080, AA017047, AA021630, AA046286, |
| | described by the general formula of a-b, where a is any | AA063218, AA076542, AA158847, AA159397, AA160406, AA213767, |
| | integer between 1 to 1570 of SEQ ID NO: 125, b is an | AA255605, AA422075, AA421997, AA424997 |
| | integer of 15 to 1584, where both a and b correspond to the | |
| | positions of nucleotide residues shown in SEQ ID NO: 125, | |
| | and where b is greater than or equal to a + 14. | |
| 735711 | Preferably excluded from the present invention are one or | |
| | more polynucleotides comprising a nucleotide sequence | |
| | described by the general formula of a-b, where a is any | |
| | integer between 1 to 1290 of SEQ ID NO: 126, b is an | |
| | integer of 15 to 1304, where both a and b correspond to the | |
| | positions of nucleotide residues shown in SEQ ID NO: 126, | |
| | and where b is greater than or equal to a + 14. | |
| 742413 | Preferably excluded from the present invention are one or | R99084, R99627 |
| | more polynucleotides comprising a nucleotide sequence | |
| | described by the general formula of a-b, where a is any | |
| | integer between 1 to 887 of SEQ ID NO: 127, b is an | |
| | integer of 15 to 901, where both a and b correspond to the | |
| | positions of nucleotide residues shown in SEQ ID NO: 127, | |
| | and where b is greater than or equal to a + 14. | |
| 742676 | Preferably excluded from the present invention are one or | R40095, T40106, T40156, T41006, T46845, T46862, T46892, T51126, |
| | more polynucleotides comprising a nucleotide sequence | T51142, T51176, T51197, T53736, T53747, T53827, T53835, T53850, |
| | described by the general formula of a-b, where a is any | T53939, T53959, T55991, T56035, T56068, T56236, T56378, T57000, |
| | integer between 1 to 3273 of SEQ ID NO: 128, b is an | T57001, T58101, T58719, T58786, T58850, T58866, T58898, T58906, |
| | integer of 15 to 3287, where both a and b correspond to the | T58910, T58925, T58961, T60324, T60332, T60352, T60362, T60377, |
| | positions of nucleotide residues shown in SEQ ID NO: 128, | T60385, T60424, T60444, T60476, T60477, T60507, T60570, T60599, |
| | and where b is greater than or equal to a + 14. | T60631, T61109, T61277, T61376, T61409, T61618, T61702, T61743, |
| | | T61865, T61875, T62046, T62079, T62110, T62136, T39959, T47778, |
| | | T47810, T47778, T47810, T53910, T61195, T61199, T61883, T62738, |
| | | T62764, T62888, T62914, T64121, T64186, T64232, T64242, T64305, |
| | | T64309, T64585, T64595, T64652, T64692, T64696, T64738, T64751, |
| | | T67432, T67593, T67633, T67703, T67725, T67736, T67739, T67753, |
| | | T67755, T67820, T67837, T67845, T67848, T67862, T67864, T67886, |
| | | T67895, T67907, T67922, T67929, T67971, T68044, T68055, T68070, |
| | | T68106, T68107, T68170, T68176, T68201, T68220, T68245, T68267, |
| | | T68291, T68301, T68329, T68355, T68367, T68401, T68516, T68607, |
| | | T68688, T68716, T68772, T68781, T68842, T68914, T69001, T69031, |
| | | T69081, T69122, T69139, T69145, T69180, T69197, T69206, T69230, |
| | | T69243, T69283, T69293, T69317, T69358, T69368, T69400, T69420, |
| | | T69445, T70452, T70475, T70494, T70495, T70498, T70975, T71039, |
| | | T71105, T71313, T71351, T71356, T71429, T71457, T71518, T71692, |
| | | T71698, T71712, T71715, T71781, T71784, T71800, T71851, T71857, |
| | | T71870, T71875, T71895, T71908, T71914, T71916, T71959, T72031, |
| | | T72037, T72042, T72063, T72065, T72079, T72098, T72099, T72152, |
| | | T72177, T72178, T72199, T72223, T72300, T72304, T72360, T72394, |
| | | T72407, T72418, T72451, T72456, T72464, T72510, T72517, T72525, |
| | | T72793, T72803, T72821, T72826, T72827, T72956, T72957, T72978, |
| | | T73010, T73052, T73096, T73203, T73225, T73250, T73258, T73265, |
| | | T73317, T73333, T73382, T73400, T73410, T73425, T73427, T73445, |
| | | T73493, T73495, T73512, T73566, T73666, T73729, T73768, T73787, |
| | | T73819, T73868, T73873, T73920, T73931, T73952, T73962, T74033, |
| | | T74101, T74111, T74269, T74273, T74372, T74380, T74407, T74474, |
| | | T74485, T74541, T74598, T74615, T74645, T74658, T74673, T74677, |
| | | T74756, T74765, T74843, T74854, T74860, T74863, T74914, T71341, |
| | | T71501, T77799, T90078, T82897, T95610, T95711, R02292, R02293, |
| | | R06796, T95746, R98475, H48262, H48353, H58120, H58121, H61463, |
| | | H67459, T70620, H90426, H90482, H94389, N33594, N49440, N75535, |
| | | W05328, W19064, W86031, AA011414, AA026625, AA026737, AA235252 |
| 742781 | Preferably excluded from the present invention are one or | R00982, R00983, R20611, R21647, R46119, R46119, H29203, H29204, |
| | more polynucleotides comprising a nucleotide sequence | N47470, N47471, N64818, N75670, N79512, N92805, W16709, AA023019, |
| | described by the general formula of a-b, where a is any | AA022493, AA143187, AA171546, AA233410, AA460731 |
| | integer between 1 to 1668 of SEQ ID NO: 129, b is an | |
| | integer of 15 to 1682, where both a and b correspond to the | |
| | positions of nucleotide residues shown in SEQ ID NO: 129, | |
| | and where b is greater than or equal to a + 14. | |
| 743356 | Preferably excluded from the present invention are one or | |
| | more polynucleotides comprising a nucleotide sequence | |
| | described by the general formula of a-b, where a is any | |
| | integer between 1 to 286 of SEQ ID NO: 130, b is an | |
| | integer of 15 to 300, where both a and b correspond to the | |
| | positions of nucleotide residues shown in SEQ ID NO: 130, | |
| | and where b is greater than or equal to a + 14. | |
| 745694 | Preferably excluded from the present invention are one or | |
| | more polynucleotides comprising a nucleotide sequence | |
| | described by the general formula of a-b, where a is any | |
| | integer between 1 to 91 of SEQ ID NO: 131, b is an integer | |
| | of 15 to 105, where both a and b correspond to the | |
| | positions of nucleotide residues shown in SEQ ID NO: 131, | |
| | and where b is greater than or equal to a + 14. | |
| 747235 | Preferably excluded from the present invention are one or | |
| | more polynucleotides comprising a nucleotide sequence | |
| | described by the general formula of a-b, where a is any | |
| | integer between 1 to 897 of SEQ ID NO: 132, b is an | |
| | integer of 15 to 911, where both a and b correspond to the | |
| | positions of nucleotide residues shown in SEQ ID NO: 132, | |
| | and where b is greater than or equal to a + 14. | |
| 750986 | Preferably excluded from the present invention are one or | |
| | more polynucleotides comprising a nucleotide sequence | |
| | described by the general formula of a-b, where a is any | |
| | integer between 1 to 3562 of SEQ ID NO: 133, b is an | |
| | integer of 15 to 3576, where both a and b correspond to the | |
| | positions of nucleotide residues shown in SEQ ID NO: 133, | |
| | and where b is greater than or equal to a + 14. | |
| 751068 | Preferably excluded from the present invention are one or | W23633, W35271, W86390, W86391 |
| | more polynucleotides comprising a nucleotide sequence | |
| | described by the general formula of a-b, where a is any | |
| | integer between 1 to 1179 of SEQ ID NO: 134, b is an | |
| | integer of 15 to 1193, where both a and b correspond to the | |
| | positions of nucleotide residues shown in SEQ ID NO: 134, | |
| | and where b is greater than or equal to a + 14. | |
| 751164 | Preferably excluded from the present invention are one or | |
| | more polynucleotides comprising a nucleotide sequence | |
| | described by the general formula of a-b, where a is any | |
| | integer between 1 to 1931 of SEQ ID NO: 135, b is an | |
| | integer of 15 to 1945, where both a and b correspond to the | |
| | positions of nucleotide residues shown in SEQ ID NO: 135, | |
| | and where b is greater than or equal to a + 14. | |
| 751890 | Preferably excluded from the present invention are one or | R12199, AA056402 |
| | more polynucleotides comprising a nucleotide sequence | |
| | described by the general formula of a-b, where a is any | |
| | integer between 1 to 1132 of SEQ ID NO: 136, b is an | |
| | integer of 15 to 1146, where both a and b correspond to the | |
| | positions of nucleotide residues shown in SEQ ID NO: 136, | |
| | and where b is greater than or equal to a + 14. | |
| 751991 | Preferably excluded from the present invention are one or | |
| | more polynucleotides comprising a nucleotide sequence | |
| | described by the general formula of a-b, where a is any | |
| | integer between 1 to 2331 of SEQ ID NO: 137, b is an | |
| | integer of 15 to 2345, where both a and b correspond to the | |
| | positions of nucleotide residues shown in SEQ ID NO: 137, | |
| | and where b is greater than or equal to a + 14. | |
| 752449 | Preferably excluded from the present invention are one or | H49093, H63940, H68327, H72930, H80397, N59075, N59482 |
| | more polynucleotides comprising a nucleotide sequence | |
| | described by the general formula of a-b, where a is any | |
| | integer between 1 to 717 of SEQ ID NO: 138, b is an | |
| | integer of 15 to 731, where both a and b correspond to the | |
| | positions of nucleotide residues shown in SEQ ID NO: 138, | |
| | and where b is greater than or equal to a + 14. | |
| 752504 | Preferably excluded from the present invention are one or | |
| | more polynucleotides comprising a nucleotide sequence | |
| | described by the general formula of a-b, where a is any | |
| | integer between 1 to 743 of SEQ ID NO: 139, b is an | |
| | integer of 15 to 757, where both a and b correspond to the | |
| | positions of nucleotide residues shown in SEQ ID NO: 139, | |
| | and where b is greater than or equal to a + 14. | |
| 752688 | Preferably excluded from the present invention are one or | T83204, W07391 |
| | more polynucleotides comprising a nucleotide sequence | |
| | described by the general formula of a-b, where a is any | |
| | integer between 1 to 649 of SEQ ID NO: 140, b is an | |
| | integer of 15 to 663, where both a and b correspond to the | |
| | positions of nucleotide residues shown in SEQ ID NO: 140, | |
| | and where b is greater than or equal to a + 14. | |
| 752889 | Preferably excluded from the present invention are one or | |
| | more polynucleotides comprising a nucleotide sequence | |
| | described by the general formula of a-b, where a is any | |
| | integer between 1 to 3921 of SEQ ID NO: 141, b is an | |
| | integer of 15 to 3935, where both a and b correspond to the | |
| | positions of nucleotide residues shown in SEQ ID NO: 141, | |
| | and where b is greater than or equal to a + 14. | |
| 753150 | Preferably excluded from the present invention are one or | |
| | more polynucleotides comprising a nucleotide sequence | |
| | described by the general formula of a-b, where a is any | |
| | integer between 1 to 2198 of SEQ ID NO: 142, b is an | |
| | integer of 15 to 2212, where both a and b correspond to the | |
| | positions of nucleotide residues shown in SEQ ID NO: 142, | |
| | and where b is greater than or equal to a + 14. | |
| 753690 | Preferably excluded from the present invention are one or | AA262521 |
| | more polynucleotides comprising a nucleotide sequence | |
| | described by the general formula of a-b, where a is any | |
| | integer between 1 to 729 of SEQ ID NO: 143, b is an | |
| | integer of 15 to 743, where both a and b correspond to the | |
| | positions of nucleotide residues shown in SEQ ID NO: 143, | |
| | and where b is greater than or equal to a + 14. | |
| 754479 | Preferably excluded from the present invention are one or | |
| | more polynucleotides comprising a nucleotide sequence | |
| | described by the general formula of a-b, where a is any | |
| | integer between 1 to 825 of SEQ ID NO: 144, b is an | |
| | integer of 15 to 839, where both a and b correspond to the | |
| | positions of nucleotide residues shown in SEQ ID NO: 144, | |
| | and where b is greater than or equal to a + 14. | |
| 754692 | Preferably excluded from the present invention are one or | |
| | more polynucleotides comprising a nucleotide sequence | |
| | described by the general formula of a-b, where a is any | |
| | integer between 1 to 2893 of SEQ ID NO: 145, b is an | |
| | integer of 15 to 2907, where both a and b correspond to the | |
| | positions of nucleotide residues shown in SEQ ID NO: 145, | |
| | and where b is greater than or equal to a + 14. | |
| 756814 | Preferably excluded from the present invention are one or | T51378, T54439, T54440, T54492, T39385, T89470, T89560, R05534, |
| | more polynucleotides comprising a nucleotide sequence | R05644, R17667, R25313, R32922, R33132, R33284, R35666, R35777, |
| | described by the general formula of a-b, where a is any | R38043, R38132, R38752, R43414, R54027, R54028, R43414, R63780, |
| | integer between 1 to 1823 of SEQ ID NO: 146, b is an | R64328, R64614, R64615, R74563, R82622, H01362, H01835, H02683, |
| | integer of 15 to 1837, where both a and b correspond to the | H02973, H04269, H09641, H09675, H10002, H13064, H13271, H13720, |
| | positions of nucleotide residues shown in SEQ ID NO: 146, | H13933, H13934, H15328, H15712, H15993, R83464, R83844, R83845, |
| | and where b is greater than or equal to a + 14. | R89553, R95676, R97388, R98691, R98917, H48613, H48805, H51096, |
| | | H51682, H58872, H58873, H67326, H68534, H70197, H78192, H78193, |
| | | H79697, H79698, H83266, H83267, H90205, H90308, H90862, H90962, |
| | | H94344, H95788, H96137, H97956, H99868, N28553, N68855, N94629, |
| | | W31434, W31994, W46421, W52814, W56529, W56780, W58375, W58549, |
| | | W58662, W68203, W68204, W69142, W69248, W81130, W81131, W81700, |
| | | W81701, AA043367, AA043368, AA044067, AA044159, AA122334, |
| | | AA464398 , AA419080, AA423821, AA428882, AA428973, AA429196 |
| 757127 | Preferably excluded from the present invention are one or | |
| | more polynucleotides comprising a nucleotide sequence | |
| | described by the general formula of a-b, where a is any | |
| | integer between 1 to 1357 of SEQ ID NO: 147, b is an | |
| | integer of 15 to 1371, where both a and b correspond to the | |
| | positions of nucleotide residues shown in SEQ ID NO: 147, | |
| | and where b is greater than or equal to a + 14. | |
| 757347 | Preferably excluded from the present invention are one or | |
| | more polynucleotides comprising a nucleotide sequence | |
| | described by the general formula of a-b, where a is any | |
| | integer between 1 to 1743 of SEQ ID NO: 148, b is an | |
| | integer of 15 to 1757, where both a and b correspond to the | |
| | positions of nucleotide residues shown in SEQ ID NO: 148, | |
| | and where b is greater than or equal to a + 14. | |
| 757495 | Preferably excluded from the present invention are one or | R24543, R24651, R25091, R36580, R45429, R51961, R53628, R45429, |
| | more polynucleotides comprising a nucleotide sequence | R64120, R64218, R67926, R69338, R69339, R74200, R74291, R80166, |
| | described by the general formula of a-b, where a is any | H00661, H00753, H02579, H02665, H64801, H64802, H64802, N63215, |
| | integer between 1 to 3518 of SEQ ID NO: 149, b is an | N75662, W46814, W46864, W70290, W72831, W72832, W75986, W90099, |
| | integer of 15 to 3532, where both a and b correspond to the | W90197, AA025841, AA025842, AA039870, AA040233, AA043893, |
| | positions of nucleotide residues shown in SEQ ID NO: 149, | AA042891, A043018, AA062769, AA074082, AA075813, AA082428, |
| | and where b is greater than or equal to a + 14. | AA196448, AA196691 |
| 757715 | Preferably excluded from the present invention are one or | R10018, T80752, T81225, R13945, H14918, H45144, N78192, W01185, |
| | more polynucleotides comprising a nucleotide sequence | W52734, W73106, W79308, AA043840, AA044358, AA064738, AA160313, |
| | described by the general formula of a-b, where a is any | AA196613, AA226860, AA232389 |
| | integer between 1 to 1917 of SEQ ID NO: 150, b is an | |
| | integer of 15 to 1931, where both a and b correspond to the | |
| | positions of nucleotide residues shown in SEQ ID NO: 150, | |
| | and where b is greater than or equal to a + 14. | |
| 760388 | Preferably excluded from the present invention are one or | T71835, T94624, T82230, T96710, R23486, R23859, R26080, R36711, |
| | more polynucleotides comprising a nucleotide sequence | R37553, R38131, H87609, N26790, N41457, W24534, W31754, W31873, |
| | described by the general formula of a-b, where a is any | W32038, W32317, W32647, W38857, W39517, W39338, W56012, W56108, |
| | integer between 1 to 1617 of SEQ ID NO: 151, b is an | W56683, W57744, W72389, W76407, W93884, W93885, AA010989, |
| | integer of 15 to 1631, where both a and b correspond to the | AA160043, AA169520 |
| | positions of nucleotide residues shown in SEQ ID NO: 151, | |
| | and where b is greater than or equal to a + 14. | |
| 760433 | Preferably excluded from the present invention are one or | |
| | more polynucleotides comprising a nucleotide sequence | |
| | described by the general formula of a-b, where a is any | |
| | integer between 1 to 718 of SEQ ID NO: 152, b is an | |
| | integer of 15 to 732, where both a and b correspond to the | |
| | positions of nucleotide residues shown in SEQ ID NO: 152, | |
| | and where b is greater than or equal to a + 14. | |
| 760545 | Preferably excluded from the present invention are one or | |
| | more polynucleotides comprising a nucleotide sequence | |
| | described by the general formula of a-b, where a is any | |
| | integer between 1 to 480 of SEQ ID NO: 153, b is an | |
| | integer of 15 to 494, where both a and b correspond to the | |
| | positions of nucleotide residues shown in SEQ ID NO: 153, | |
| | and where b is greater than or equal to a + 14. | |
| 761566 | Preferably excluded from the present invention are one or | T69288, T69363, T94926, R12359, R26909, R27151, R37284, R61007, |
| | more polynucleotides comprising a nucleotide sequence | R61674, R68776, R68872, R70952, R71004, H92792, H92913, N25506, |
| | described by the general formula of a-b, where a is any | N32325, N57420, N68341, N94012, AA011440, AA076005, AA076006, |
| | integer between 1 to 2427 of SEQ ID NO: 154, b is an | AA129646, AA129781, AA187676 |
| | integer of 15 to 2441, where both a and b correspond to the | |
| | positions of nucleotide residues shown in SEQ ID NO: 154, | |
| | and where b is greater than or equal to a + 14. | |
| 761740 | Preferably excluded from the present invention are one or | R13217, R30963, R31018, R40301, R51543, R51544, R40301, R63409, |
| | more polynucleotides comprising a nucleotide sequence | H29530, H83725, H98067, N20307, N27578, N28375, N46832, N62348, |
| | described by the general formula of a-b, where a is any | N62593, N78359, N79110, AA041460, AA041513, AA046252, AA046371, |
| | integer between 1 to 2933 of SEQ ID NO: 155, b is an | AA125849, AA125850, AA252450, AA461403 |
| | integer of 15 to 2947, where both a and b correspond to the | |
| | positions of nucleotide residues shown in SEQ ID NO: 155, | |
| | and where b is greater than or equal to a + 14. | |
| 765215 | Preferably excluded from the present invention are one or | T54662, T54749 |
| | more polynucleotides comprising a nucleotide sequence | |
| | described by the general formula of a-b, where a is any | |
| | integer between 1 to 652 of SEQ ID NO: 156, b is an | |
| | integer of 15 to 666, where both a and b correspond to the | |
| | positions of nucleotide residues shown in SEQ ID NO: 156, | |
| | and where b is greater than or equal to a + 14. | |
| 765428 | Preferably excluded from the present invention are one or | |
| | more polynucleotides comprising a nucleotide sequence | |
| | described by the general formula of a-b, where a is any | |
| | integer between 1 to 613 of SEQ ID NO: 157, b is an | |
| | integer of 15 to 627, where both a and b correspond to the | |
| | positions of nucleotide residues shown in SEQ ID NO: 157, | |
| | and where b is greater than or equal to a + 14. | |
| 766686 | Preferably excluded from the present invention are one or | |
| | more polynucleotides comprising a nucleotide sequence | |
| | described by the general formula of a-b, where a is any | |
| | integer between 1 to 888 of SEQ ID NO: 158, b is an | |
| | integer of 15 to 902, where both a and b correspond to the | |
| | positions of nucleotide residues shown in SEQ ID NO: 158, | |
| | and where b is greater than or equal to a + 14. | |
| 767396 | Preferably excluded from the present invention are one or | AA172282, AA220915 |
| | more polynucleotides comprising a nucleotide sequence | |
| | described by the general formula of a-b, where a is any | |
| | integer between 1 to 579 of SEQ ID NO: 159, b is an | |
| | integer of 15 to 593, where both a and b correspond to the | |
| | positions of nucleotide residues shown in SEQ ID NO: 159, | |
| | and where b is greater than or equal to a + 14. | |
| 767501 | Preferably excluded from the present invention are one or | T48254, T48253, T61610, T61695, T70390, T70397, T86348, R11405, |
| | more polynucleotides comprising a nucleotide sequence | R05486, R05593, R19155, R61228, R61229, R70142, R70143, R78897, |
| | described by the general formula of a-b, where a is any | R78993, R94037, N81160, W90480, W90479, W95079, AA192429 |
| | integer between 1 to 1833 of SEQ ID NO: 160, b is an | |
| | integer of 15 to 1847, where both a and b correspond to the | |
| | positions of nucleotide residues shown in SEQ ID NO: 160, | |
| | and where b is greater than or equal to a + 14. | |
| 767945 | Preferably excluded from the present invention are one or | |
| | more polynucleotides comprising a nucleotide sequence | |
| | described by the general formula of a-b, where a is any | |
| | integer between 1 to 356 of SEQ ID NO: 16i, b is an | |
| | integer of 15 to 370, where both a and b correspond to the | |
| | positions of nucleotide residues shown in SEQ ID NO: 161, | |
| | and where b is greater than or equal to a + 14. | |
| 768996 | Preferably excluded from the present invention are one or | |
| | more polynucleotides comprising a nucleotide sequence | |
| | described by the general formula of a-b, where a is any | |
| | integer between 1 to 440 of SEQ ID NO: 162, b is an | |
| | integer of 15 to 454, where both a and b correspond to the | |
| | positions of nucleotide residues shown in SEQ ID NO: 162, | |
| | and where b is greater than or equal to a + 14. | |
| 771415 | Preferably excluded from the present invention are one or | |
| | more polynucleotides comprising a nucleotide sequence | |
| | described by the general formula of a-b, where a is any | |
| | integer between 1 to 1082 of SEQ ID NO: 163, b is an | |
| | integer of 15 to 1096, where both a and b correspond to the | |
| | positions of nucleotide residues shown in SEQ ID NO: 163, | |
| | and where b is greater than or equal to a + 14. | |
| 772657 | Preferably excluded from the present invention are one or | T39789, R21583, R23570, R63603, R63604, R80168, R80167, H02287, |
| | more polynucleotides comprising a nucleotide sequence | H02391, N25705, N26310, N26346, N34095, N39754, N51681, N91936, |
| | described by the general formula of a-b, where a is any | W24114, AA035390, AA035389, AA043307, AA043308, AA043279, |
| | integer between 1 to 2009 of SEQ ID NO: 164, b is an | AA043280, AA053303, AA058551, AA082488, AA122113, AA142961, |
| | integer of 15 to 2023, where both a and b correspond to the | AA149350, AA149351, AA150613, AA150739, AA150847, AA179036, |
| | positions of nucleotide residues shown in SEQ ID NO: 164, | AA251541, AA251499 |
| | and where b is greater than or equal to a + 14. | |
| 773123 | Preferably excluded from the present invention are one or | |
| | more polynucleotides comprising a nucleotide sequence | |
| | described by the general formula of a-b, where a is any | |
| | integer between 1 to 1306 of SEQ ID NO: 165, b is an | |
| | integer of 15 to 1320, where both a and b correspond to the | |
| | positions of nucleotide residues shown in SEQ ID NO: 165, | |
| | and where b is greater than or equal to a + 14. | |
| 773193 | Preferably excluded from the present invention are one or | |
| | more polynucleotides comprising a nucleotide sequence | |
| | described by the general formula of a-b, where a is any | |
| | integer between 1 to 1191 of SEQ ID NO: 166, b is an | |
| | integer of 15 to 1205, where both a and b correspond to the | |
| | positions of nucleotide residues shown in SEQ ID NO: 166, | |
| | and where b is greater than or equal to a + 14. | |
| 773710 | Preferably excluded from the present invention are one or | T91089, T84760, R18409, R42472, R44656, R42472, R44656, R70650, |
| | more polynucleotides comprising a nucleotide sequence | H94730, H94759, N30658, N66021, N66027, N66688, N95136, N98956, |
| | described by the general formula of a-b, where a is any | AA131377, AA131494, AA131593, AA131658, AA227712, AA227958, |
| | integer between 1 to 1399 of SEQ ID NO: 167, b is an | AA424025 |
| | integer of 15 to 1413, where both a and b correspond to the | |
| | positions of nucleotide residues shown in SEQ ID NO: 167, | |
| | and where b is greater than or equal to a + 14. | |
| 774283 | Preferably excluded from the present invention are one or | R81621, H75455, H75454, AA165108, AA164711, AA461410, AA461095 |
| | more polynucleotides comprising a nucleotide sequence | |
| | described by the general formula of a-b, where a is any | |
| | integer between 1 to 1214 of SEQ ID NO: 168, b is an | |
| | integer of 15 to 1228, where both a and b correspond to the | |
| | positions of nucleotide residues shown in SEQ ID NO: 168, | |
| | and where b is greater than or equal to a + 14. | |
| 774369 | Preferably excluded from the present invention are one or | R26376, R66765, H86185, AA016184, AA021102, AA028914, AA133277, |
| | more polynucleotides comprising a nucleotide sequence | AA133354 |
| | described by the general formula of a-b, where a is any | |
| | integer between 1 to 1911 of SEQ ID NO: 169, his an | |
| | integer of 15 to 1925, where both a and b correspond to the | |
| | positions of nucleotide residues shown in SEQ ID NO: 169, | |
| | and where b is greater than or equal to a + 14. | |
| 774754 | Preferably excluded from the present invention are one or | W38589, W74674, W74780, N90213, AA043957, AA043823, AA157016 |
| | more polynucleotides comprising a nucleotide sequence | |
| | described by the general formula of a-b, where a is any | |
| | integer between 1 to 1544 of SEQ ID NO: 170, b is an | |
| | integer of 15 to 1558, where both a and b correspond to the | |
| | positions of nucleotide residues shown in SEQ ID NO: 170, | |
| | and where b is greater than or equal to a + 14. | |
| 774823 | Preferably excluded from the present invention are one or | |
| | more polynucleotides comprising a nucleotide sequence | |
| | described by the general formula of a-b, where a is any | |
| | integer between 1 to 1388 of SEQ ID NO: 171, b is an | |
| | integer of 15 to 1402, where both a and b correspond to the | |
| | positions of nucleotide residues shown in SEQ ID NO: 171, | |
| | and where b is greater than or equal to a + 14. | |
| 775510 | Preferably excluded from the present invention are one or | |
| | more polynucleotides comprising a nucleotide sequence | |
| | described by the general formula of a-b, where a is any | |
| | integer between 1 to 476 of SEQ ID NO: 172, b is an | |
| | integer of 15 to 490, where both a and b correspond to the | |
| | positions of nucleotide residues shown in SEQ ID NO: 172, | |
| | and where b is greater than or equal to a + 14. | |
| 775634 | Preferably excluded from the present invention are one or | |
| | more polynucleotides comprising a nucleotide sequence | |
| | described by the general formula of a-b, where a is any | |
| | integer between 1 to 1423 of SEQ ID NO: 173, b is an | |
| | integer of 15 to 1437, where both a and b correspond to the | |
| | positions of nucleotide residues shown in SEQ ID NO: 173, | |
| | and where b is greater than or equal to a + 14. | |
| 775640 | Preferably excluded from the present invention are one or | |
| | more polynucleotides comprising a nucleotide sequence | |
| | described by the general formula of a-b, where a is any | |
| | integer between 1 to 1801 of SEQ ID NO: 174, b is an | |
| | integer of 15 to 1815, where both a and b correspond to the | |
| | positions of nucleotide residues shown in SEQ ID NO: 174, | |
| | and where b is greater than or equal to a + 14. | |
| 775802 | Preferably excluded from the present invention are one or | |
| | more polynucleotides comprising a nucleotide sequence | |
| | described by the general formula of a-b, where a is any | |
| | integer between 1 to 957 of SEQ ID NO: 175, b is an | |
| | integer of 15 to 971, where both a and b correspond to the | |
| | positions of nucleotide residues shown in SEQ ID NO: 175, | |
| | and where b is greater than or equal to a + 14. | |
| 777470 | Preferably excluded from the present invention are one or | R72009, R81577, H26684, H45155, R87903, R87922, W46492, W51858 |
| | more polynucleotides comprising a nucleotide sequence | |
| | described by the general formula of a-b, where a is any | |
| | integer between 1 to 1608 of SEQ ID NO: 176, b is an | |
| | integer of 15 to 1622, where both a and b correspond to the | |
| | positions of nucleotide residues shown in SEQ ID NO: 176, | |
| | and where b is greater than or equal to a + 14. | |
| 777652 | Preferably excluded from the present invention are one or | |
| | more polynucleotides comprising a nucleotide sequence | |
| | described by the general formula of a-b, where a is any | |
| | integer between 1 to 326 of SEQ ID NO: 177, b is an | |
| | integer of 15 to 340, where both a and b correspond to the | |
| | positions of nucleotide residues shown in SEQ ID NO: 177, | |
| | and where b is greater than or equal to a + 14. | |
| 778998 | Preferably excluded from the present invention are one or | |
| | more polynucleotides comprising a nucleotide sequence | |
| | described by the general formula of a-b, where a is any | |
| | integer between 1 to 602 of SEQ ID NO: 178, b is an | |
| | integer of 15 to 616, where both a and b correspond to the | |
| | positions of nucleotide residues shown in SEQ ID NO: 178, | |
| | and where b is greater than or equal to a + 14. | |
| 779273 | Preferably excluded from the present invention are one or | |
| | more polynucleotides comprising a nucleotide sequence | |
| | described by the general formula of a-b, where a is any | |
| | integer between 1 to 2053 of SEQ ID NO: 179, b is an | |
| | integer of 15 to 2067, where both a and b correspond to the | |
| | positions of nucleotide residues shown in SEQ ID NO: 179, | |
| | and where b is greater than or equal to a + 14. | |
| 779297 | Preferably excluded from the present invention are one or | T58639, T58688, T65H4, T65181, T79935, R37097, H01720, H93130, |
| | more polynucleotides comprising a nucleotide sequence | N49316, N49558, W32803, W95634, AA025739, AA426310, AA428778 |
| | described by the general formula of a-b, where a is any | |
| | integer between 1 to 1813 of SEQ ID NO: 180, b is an | |
| | integer of 15 to 1827, where both a and b correspond to the | |
| | positions of nucleotide residues shown in SEQ ID NO: 180, | |
| | and where b is greater than or equal to a + 14. | |
| 779664 | Preferably excluded from the present invention are one or | T91627, R18325, R37374, R59694, R60216, R60450, H28798, H28818, |
| | more polynucleotides comprising a nucleotide sequence | N30799, N39412, W74507, W79219, AA083583, AA135148, AA164254, |
| | described by the general formula of a-b, where a is any | AA164365, AA172128 |
| | integer between 1 to 2012 of SEQ ID NO: 181, b is an | |
| | integer of 15 to 2026, where both a and b correspond to the | |
| | positions of nucleotide residues shown in SEQ ID NO: 181, | |
| | and where b is greater than or equal to a + 14. | |
| 780565 | Preferably excluded from the present invention are one or | |
| | more polynucleotides comprising a nucleotide sequence | |
| | described by the general formula of a-b, where a is any | |
| | integer between 1 to 442 of SEQ ID NO: 182, b is an | |
| | integer of 15 to 456, where both a and b correspond to the | |
| | positions of nucleotide residues shown in SEQ ID NO: 182, | |
| | and where b is greater than or equal to a + 14. | |
| 780665 | Preferably excluded from the present invention are one or | W60277 |
| | more polynucleotides comprising a nucleotide sequence | |
| | described by the general formula of a-b, where a is any | |
| | integer between 1 to 467 of SEQ ID NO: 183, his an | |
| | integer of 15 to 481, where both a and b correspond to the | |
| | positions of nucleotide residues shown in SEQ ID NO: 183, | |
| | and where b is greater than or equal to a + 14. | |
| 780666 | Preferably excluded from the present invention are one or | |
| | more polynucleotides comprising a nucleotide sequence | |
| | described by the general formula of a-b, where a is any | |
| | integer between 1 to 482 of SEQ ID NO: 184, his an | |
| | integer of 15 to 496, where both a and b correspond to the | |
| | positions of nucleotide residues shown in SEQ ID NO: 184, | |
| | and where b is greater than or equal to a + 14. | |
| 781579 | Preferably excluded from the present invention are one or | T57785, T82345, W86564, AA078858, AA155901, AA161451, AA178927, |
| | more polynucleotides comprising a nucleotide sequence | AA194606 |
| | described by the general formula of a-b, where a is any | |
| | integer between 1 to 1293 of SEQ ID NO: 185, b is an | |
| | integer of 15 to 1307, where both a and b correspond to the | |
| | positions of nucleotide residues shown in SEQ ID NO: 185, | |
| | and where b is greater than or equal to a + 14. | |
| 782052 | Preferably excluded from the present invention are one or | |
| | more polynucleotides comprising a nucleotide sequence | |
| | described by the general formula of a-b, where a is any | |
| | integer between 1 to 435 of SEQ ID NO: 186, b is an | |
| | integer of 15 to 449, where both a and b correspond to the | |
| | positions of nucleotide residues shown in SEQ ID NO: 186, | |
| | and where b is greater than or equal to a + 14. | |
| 782393 | Preferably excluded from the present invention are one or | N25688, N30017, N34076, N36364, N46861, N47181, N62606, N92811, |
| | more polynucleotides comprising a nucleotide sequence | W24930, W25337, W47158, W47279, W49821, AA234682, AA234755, |
| | described by the general formula of a-b, where a is any | AA252206 |
| | integer between 1 to 937 of SEQ ID NO: 187, b is an | |
| | integer of 15 to 951, where both a and b correspond to the | |
| | positions of nucleotide residues shown in SEQ ID NO: 187, | |
| | and where b is greater than or equal to a + 14. | |
| 782907 | Preferably excluded from the present invention are one or | |
| | more polynucleotides comprising a nucleotide sequence | |
| | described by the general formula of a-b, where a is any | |
| | integer between 1 to 367 of SEQ ID NO: 188, b is an | |
| | integer of 15 to 381, where both a and b correspond to the | |
| | positions of nucleotide residues shown in SEQ ID NO: 188, | |
| | and where b is greater than or equal to a + 14. | |
| 783220 | Preferably excluded from the present invention are one or | |
| | more polynucleotides comprising a nucleotide sequence | |
| | described by the general formula of a-b, where a is any | |
| | integer between 1 to 1295 of SEQ ID NO: 189, b is an | |
| | integer of 15 to 1309, where both a and b correspond to the | |
| | positions of nucleotide residues shown in SEQ ID NO: 189, | |
| | and where b is greater than or equal to a + 14. | |
| 783300 | Preferably excluded from the present invention are one or | |
| | more polynucleotides comprising a nucleotide sequence | |
| | described by the general formula of a-b, where a is any | |
| | integer between 1 to 1885 of SEQ ID NO: 190, b is an | |
| | integer of 15 to 1899, where both a and b correspond to the | |
| | positions of nucleotide residues shown in SEQ ID NO: 190, | |
| | and where b is greater than or equal to a + 14. | |
| 783938 | Preferably excluded from the present invention are one or | |
| | more polynucleotides comprising a nucleotide sequence | |
| | described by the general formula of a-b, where a is any | |
| | integer between 1 to 2476 of SEQ ID NO: 191, b is an | |
| | integer of 15 to 2490, where both a and b correspond to the | |
| | positions of nucleotide residues shown in SEQ ID NO: 191, | |
| | and where b is greater than or equal to a + 14. | |
| 784024 | Preferably excluded from the present invention are one or | H89685, N20336, N27611, N31596, N42655, N51849, N51859, N62943, |
| | more polynucleotides comprising a nucleotide sequence | AA236316, AA253217 |
| | described by the general formula of a-b, where a is any | |
| | integer between 1 to 1794 of SEQ ID NO: 192, b is an | |
| | integer of 15 to 1808, where both a and b correspond to the | |
| | positions of nucleotide residues shown in SEQ ID NO: 192, | |
| | and where b is greater than or equal to a + 14. | |
| 784575 | Preferably excluded from the present invention are one or | |
| | more polynucleotides comprising a nucleotide sequence | |
| | described by the general formula of a-b, where a is any | |
| | integer between 1 to 1059 of SEQ ID NO: 193, b is an | |
| | integer of 15 to 1073, where both a and b correspond to the | |
| | positions of nucleotide residues shown in SEQ ID NO: 193, | |
| | and where b is greater than or equal to a + 14. | |
| 785006 | Preferably excluded from the present invention are one or | |
| | more polynucleotides comprising a nucleotide sequence | |
| | described by the general formula of a-b, where a is any | |
| | integer between 1 to 373 of SEQ ID NO: 194, b is an | |
| | integer of 15 to 387, where both a and b correspond to the | |
| | positions of nucleotide residues shown in SEQ ID NO: 194, | |
| | and where b is greater than or equal to a + 14. | |
| 785069 | Preferably excluded from the present invention are one or | |
| | more polynucleotides comprising a nucleotide sequence | |
| | described by the general formula of a-b, where a is any | |
| | integer between 1 to 959 of SEQ ID NO: 195, b is an | |
| | integer of 15 to 973, where both a and b correspond to the | |
| | positions of nucleotide residues shown in SEQ ID NO: 195, | |
| | and where b is greater than or equal to a + 14. | |
| 785237 | Preferably excluded from the present invention are one or | |
| | more polynucleotides comprising a nucleotide sequence | |
| | described by the general formula of a-b, where a is any | |
| | integer between 1 to 629 of SEQ ID NO: 196, b is an | |
| | integer of 15 to 643, where both a and b correspond to the | |
| | positions of nucleotide residues shown in SEQ ID NO: 196, | |
| | and where b is greater than or equal to a + 14. | |
| 786111 | Preferably excluded from the present invention are one or | |
| | more polynucleotides comprising a nucleotide sequence | |
| | described by the general formula of a-b, where a is any | |
| | integer between 1 to 438 of SEQ ID NO: 197, b is an | |
| | integer of 15 to 452, where both a and b correspond to the | |
| | positions of nucleotide residues shown in SEQ ID NO: 197, | |
| | and where b is greater than or equal to a + 14. | |
| 787036 | Preferably excluded from the present invention are one or | R11814, H14163, N42713, W69844, AA076578 |
| | more polynucleotides comprising a nucleotide sequence | |
| | described by the general formula of a-b, where a is any | |
| | integer between 1 to 1018 of SEQ ID NO: 198, b is an | |
| | integer of 15 to 1032, where both a and b correspond to the | |
| | positions of nucleotide residues shown in SEQ ID NO: 198, | |
| | and where b is greater than or equal to a + 14. | |
| 788991 | Preferably excluded from the present invention are one or | T94446, T94533, R12065, R13249, R13635, R38488, R40329, R43592, |
| | more polynucleotides comprising a nucleotide sequence | R46434, R43592, R40329, H16332, H20990, H28489, H29906, H39987, |
| | described by the general formula of a-b, where a is any | R83899, R85669, R85905, H57115, H89691, W01303, W03530, W44921, |
| | integer between 1 to 2718 of SEQ ID NO: 199, b is an | W52157, AA001492, AA001493, AA054074, AA054263, AA059205, |
| | integer of 15 to 2732, where both a and b correspond to the | AA059263, AA461201, AA461378, AA417279, AA417269, AA429343 |
| | positions of nucleotide residues shown in SEQ ID NO: 199, | |
| | and where b is greater than or equal to a + 14. | |
| 789125 | Preferably excluded from the present invention are one or | |
| | more polynucleotides comprising a nucleotide sequence | |
| | described by the general formula of a-b, where a is any | |
| | integer between 1 to 2301 of SEQ ID NO: 200, b is an | |
| | integer of 15 to 2315, where both a and b correspond to the | |
| | positions of nucleotide residues shown in SEQ ID NO: 200, | |
| | and where b is greater than or equal to a + 14. | |
| 789626 | Preferably excluded from the present invention are one or | |
| | more polynucleotides comprising a nucleotide sequence | |
| | described by the general formula of a-b, where a is any | |
| | integer between 1 to 876 of SEQ ID NO: 201, b is an | |
| | integer of 15 to 890, where both a and b correspond to the | |
| | positions of nucleotide residues shown in SEQ ID NO: 201, | |
| | and where b is greater than or equal to a + 14. | |
| 789703 | Preferably excluded from the present invention are one or | |
| | more polynucleotides comprising a nucleotide sequence | |
| | described by the general formula of a-b, where a is any | |
| | integer between 1 to 1519 of SEQ ID NO: 202, b is an | |
| | integer of 15 to 1533, where both a and b correspond to the | |
| | positions of nucleotide residues shown in SEQ ID NO: 202, | |
| | and where b is greater than or equal to a + 14. | |
| 789858 | Preferably excluded from the present invention are one or | |
| | more polynucleotides comprising a nucleotide sequence | |
| | described by the general formula of a-b, where a is any | |
| | integer between 1 to 2812 of SEQ ID NO: 203, b is an | |
| | integer of 15 to 2826, where both a and b correspond to the | |
| | positions of nucleotide residues shown in SEQ ID NO: 203, | |
| | and where b is greater than or equal to a + 14. | |
| 790848 | Preferably excluded from the present invention are one or | R62582, R62583, N45584, N48793, N49502 |
| | more polynucleotides comprising a nucleotide sequence | |
| | described by the general formula of a-b, where a is any | |
| | integer between 1 to 1524 of SEQ ID NO: 204, b is an | |
| | integer of 15 to 1538, where both a and b correspond to the | |
| | positions of nucleotide residues shown in SEQ ID NO: 204, | |
| | and where b is greater than or equal to a + 14. | |
| 790893 | Preferably excluded from the present invention are one or | |
| | more polynucleotides comprising a nucleotide sequence | |
| | described by the general formula of a-b, where a is any | |
| | integer between 1 to 2328 of SEQ ID NO: 205, b is an | |
| | integer of 15 to 2342, where both a and b correspond to the | |
| | positions of nucleotide residues shown in SEQ ID NO: 205, | |
| | and where b is greater than or equal to a + 14. | |
| 790912 | Preferably excluded from the present invention are one or | T79209, R46211, H05016, H25436, AA236254, AA236301 |
| | more polynucleotides comprising a nucleotide sequence | |
| | described by the general formula of a-b, where a is any | |
| | integer between 1 to 813 of SEQ ID NO: 206, b is an | |
| | integer of 15 to 827, where both a and b correspond to the | |
| | positions of nucleotide residues shown in SEQ ID NO: 206, | |
| | and where b is greater than or equal to a + 14. | |
| 791386 | Preferably excluded from the present invention are one or | |
| | more polynucleotides comprising a nucleotide sequence | |
| | described by the general formula of a-b, where a is any | |
| | integer between 1 to 2312 of SEQ ID NO: 207, b is an | |
| | integer of 15 to 2326, where both a and b correspond to the | |
| | positions of nucleotide residues shown in SEQ ID NO: 207, | |
| | and where b is greater than or equal to a + 14. | |
| 791598 | Preferably excluded from the present invention are one or | |
| | more polynucleotides comprising a nucleotide sequence | |
| | described by the general formula of a-b, where a is any | |
| | integer between 1 to 1448 of SEQ ID NO: 208, b is an | |
| | integer of 15 to 1462, where both a and b correspond to the | |
| | positions of nucleotide residues shown in SEQ ID NO: 208, | |
| | and where b is greater than or equal to a + 14. | |
| 791619 | Preferably excluded from the present invention are one or | R14767, R25924, R42537, R42537, R61122, R61844, H60027, H67016, |
| | more polynucleotides comprising a nucleotide sequence | W58641, W58640 |
| | described by the general formula of a-b, where a is any | |
| | integer between 1 to 2567 of SEQ ID NO: 209, b is an | |
| | integer of 15 to 2581, where both a and b correspond to the | |
| | positions of nucleotide residues shown in SEQ ID NO: 209, | |
| | and where b is greater than or equal to a + 14. | |
| 791628 | Preferably excluded from the present invention are one or | |
| | more polynucleotides comprising a nucleotide sequence | |
| | described by the general formula of a-b, where a is any | |
| | integer between 1 to 1980 of SEQ ID NO: 210, b is an | |
| | integer of 15 to 1994, where both a and b correspond to the | |
| | positions of nucleotide residues shown in SEQ ID NO: 210, | |
| | and where b is greater than or equal to a + 14. | |
| 791751 | Preferably excluded from the present invention are one or | R09808, R68694, N32219, W63661, AA040449, AA234814, AA235276 |
| | more polynucleotides comprising a nucleotide sequence | |
| | described by the general formula of a-b, where a is any | |
| | integer between 1 to 1500 of SEQ ID NO: 211, b is an | |
| | integer of 15 to 1514, where both a and b correspond to the | |
| | positions of nucleotide residues shown in SEQ ID NO: 211, | |
| | and where b is greater than or equal to a + 14. | |
| 792557 | Preferably excluded from the present invention are one or | A056147 |
| | more polynucleotides comprising a nucleotide sequence | |
| | described by the general formula of a-b, where a is any | |
| | integer between 1 to 469 of SEQ ID NO: 212, b is an | |
| | integer of 15 to 483, where both a and b correspond to the | |
| | positions of nucleotide residues shown in SEQ ID NO: 212, | |
| | and where b is greater than or equal to a + 14. | |
| 792568 | Preferably excluded from the present invention are one or | |
| | more polynucleotides comprising a nucleotide sequence | |
| | described by the general formula of a-b, where a is any | |
| | integer between 1 to 869 of SEQ ID NO: 213, b is an | |
| | integer of 15 to 883, where both a and b correspond to the | |
| | positions of nucleotide residues shown in SEQ ID NO: 213, | |
| | and where b is greater than or equal to a + 14. | |
| 792590 | Preferably excluded from the present invention are one or | T64783, T72536, T80095, R13317, R18856, R24593, R40794, R44398, |
| | more polynucleotides comprising a nucleotide sequence | R44398, R40794, R75943, R76782, H84406, H84405, N26104, N26704, |
| | described by the general formula of a-b, where a is any | N34584, N36742, N36957, N46274, N48855, N53045, N67252, |
| | integer between 1 to 4785 of SEQ ID NO: 214, b is an | N73229, N75830, W07313, W38467, N90066, AA057494, AA187860, |
| | integer of 15 to 4799, where both a and b correspond to the | AA187859, AA253007, AA253130, AA258718, AA425229, AA425655 |
| | positions of nucleotide residues shown in SEQ ID NO: 214, | |
| | and where b is greater than or equal to a + 14. | |
| 793323 | Preferably excluded from the present invention are one or | T55304, T58854, T61562, T90445, R07868, R07924, T66596, T78891, |
| | more polynucleotides comprising a nucleotide sequence | T82882, T15970, R32044, R32101, R56409, R64171, R64286, R71032, |
| | described by the general formula of a-b, where a is any | R71031, R77398, R77397, R79661, R79851, H26905, H47068, H47147, |
| | integer between 1 to 1031 of SEQ ID NO: 215, bis an | H47364, H48041, R92212, R92317, R95919, H50513, H51351, H52213, |
| | integer of 15 to 1045, where both a and b correspond to the | H52215, H57893, H57894, H61850, H79743, H79744, H82302, H85765, |
| | positions of nucleotide residues shown in SEQ ID NO: 215, | H94322, H94414, N20359, N25613, N26068, N34211, N35221, N40430, |
| | and where b is greater than or equal to a + 14. | N54905, N62582, N69480, N70945, N74352, N74406, N75952, N76289, |
| | | N80355, W02619, W04976, N90972, AA127903, AA459690, AA459811 |
| 793466 | Preferably excluded from the present invention are one or | |
| | more polynucleotides comprising a nucleotide sequence | |
| | described by the general formula of a-b, where a is any | |
| | integer between 1 to 1150 of SEQ ID NO: 216, b is an | |
| | integer of 15 to 1164, where both a and b correspond to the | |
| | positions of nucleotide residues shown in SEQ ID NO: 216, | |
| | and where b is greater than or equal to a + 14. | |
| 793507 | Preferably excluded from the present invention are one or | T68445, T68510, H11722, N54260, N64522, N80313, W74096, W79387, |
| | more polynucleotides comprising a nucleotide sequence | AA147027, AA426623, AA424798 |
| | described by the general formula of a-b, where a is any | |
| | integer between 1 to 1580 of SEQ ID NO: 217, b is an | |
| | integer of 15 to 1594, where both a and b correspond to the | |
| | positions of nucleotide residues shown in SEQ ID NO: 217, | |
| | and where b is greater than or equal to a + 14. | |
| 793546 | Preferably excluded from the present invention are one or | |
| | more polynucleotides comprising a nucleotide sequence | |
| | described by the general formula of a-b, where a is any | |
| | integerbetween 1 to 1531 of SEQ ID NO: 218, bis an | |
| | integer of 15 to 1545, where both a and b correspond to the | |
| | positions of nucleotide residues shown in SEQ ID NO: 218, | |
| | and where b is greater than or equal to a + 14. | |
| 793559 | Preferably excluded from the present invention are one or | |
| | more polynucleotides comprising a nucleotide sequence | |
| | described by the general formula of a-b, where a is any | |
| | integer between 1 to 448 of SEQ ID NO: 219, b is an | |
| | integer of 15 to 462, where both a and b correspond to the | |
| | positions of nucleotide residues shown in SEQ ID NO: 219, | |
| | and where b is greater than or equal to a + 14. | |
| 793604 | Preferably excluded from the present invention are one or | T64153, T64282, T94117, T94206, T87138, T81405, T81406, T85085, |
| | more polynucleotides comprising a nucleotide sequence | T86057, T97192, R01163, R06234, R14694, R14930, R32761, R32762, |
| | described by the general formula of a-b, where a is any | R41244, R42415, R52098, R52193, R41244, R42415, H10037, H10091, |
| | integer between 1 to 3080 of SEQ ID NO: 220, b is an | H11045, H11133, H24727, H24726, H24776, H24823, H26838, H44556, |
| | integer of 15 to 3094, where both a and b correspond to the | H44557, H61794, H61795, H83904, N28677, N32272, N37013, N40509, |
| | positions of nucleotide residues shown in SEQ ID NO: 220, | AA029877, AA029113, N46458, N57996, W51862, W73372, W73433, |
| | and where b is greater than or equal to a + 14. | AA024892, AA024891, AA031341, AA036870, AA044325, AA044578, |
| | | AA054735, AA054742, AA069699, AA084245, AA084244, AA120803, |
| | | AA1208O4, AA227168, AA235731, AA459397, AA459622, AA464006, |
| | | AA464713, AA425178, AA429092 |
| 794121 | Preferably excluded from the present invention are one or | |
| | more polynucleotides comprising a nucleotide sequence | |
| | described by the general formula of a-b, where a is any | |
| | integer between 1 to 1742 of SEQ ID NO: 221, b is an | |
| | integer of 15 to 1756, where both a and b correspond to the | |
| | positions of nucleotide residues shown in SEQ ID NO: 221, | |
| | and where b is greater than or equal to a + 14. | |
| 794295 | Preferably excluded from the present invention are one or | H62096, AA021403, AA224005 |
| | more polynucleotides comprising a nucleotide sequence | |
| | described by the general formula of a-b, where a is any | |
| | integer between 1 to 557 of SEQ ID NO: 222, b is an | |
| | integer of 15 to 571, where both a and b correspond to the | |
| | positions of nucleotide residues shown in SEQ ID NO: 222, | |
| | and where b is greater than or equal to a + 14. | |
| 795241 | Preferably excluded from the present invention are one or | |
| | more polynucleotides comprising a nucleotide sequence | |
| | described by the general formula of a-b, where a is any | |
| | integer between 1 to 1683 of SEQ ID NO: 223, b is an | |
| | integer of 15 to 1697, where both a and b correspond to the | |
| | positions of nucleotide residues shown in SEQ ID NO: 223, | |
| | and where b is greater than or equal to a + 14. | |
| 795286 | Preferably excluded from the present invention are one or | T80215, T80216, R13602, R17713, R38783, R38784, R39897, R41783, |
| | more polynucleotides comprising a nucleotide sequence | R41783, R61528, R61584, H13658, H13659, H14690, H20561, H20654, |
| | described by the general formula of a-b, where a is any | H20770, R22585, R87081, R88769, R91028, R94865, R94866, N31866, |
| | integer between 1 to 2142 of SEQ ID NO: 224, b is an | N33177, N34225, N44964, N45304, N51118, N54239, N70835, W01441, |
| | integer of 15 to 2156, where both a and b correspond to the | W74260, W79873, W86917, W86947, W92091, AA010531, AA010532, |
| | positions of nucleotide residues shown in SEQ ID NO: 224, | AA011408, AA011464, AA130389, AA215587 |
| | and where b is greater than or equal to a + 14. | |
| 795637 | Preferably excluded from the present invention are one or | |
| | more polynucleotides comprising a nucleotide sequence | |
| | described by the general formula of a-b, where a is any | |
| | integer between 1 to 1777 of SEQ ID NO: 225, b is an | |
| | integer of 15 to 1791, where both a and b correspond to the | |
| | positions of nucleotide residues shown in SEQ ID NO: 225, | |
| | and where b is greater than or equal to a + 14. | |
| 796301 | Preferably excluded from the present invention are one or | R05274, R86959, N55553, N76938, AA039578, AA042797, AA044610, |
| | more polynucleotides comprising a nucleotide sequence | AA243346, AA243547, AA262732, AA262814 |
| | described by the general formula of a-b, where a is any | |
| | integer between 1 to 1511 of SEQ ID NO: 226, b is an | |
| | integer of 15 to 1525, where both a and b correspond to the | |
| | positions of nucleotide residues shown in SEQ ID NO: 226, | |
| | and where b is greater than or equal to a + 14. | |
| 796347 | Preferably excluded from the present invention are one or | |
| | more polynucleotides comprising a nucleotide sequence | |
| | described by the general formula of a-b, where a is any | |
| | integer between 1 to 1597 of SEQ ID NO: 227, b is an | |
| | integer of 15 to 1611, where both a and b correspond to the | |
| | positions of nucleotide residues shown in SEQ ID NO: 227, | |
| | and where b is greater than or equal to a + 14. | |
| 796579 | Preferably excluded from the present invention are one or | T39155, T40439, T65119, T65188, R61110, R61832, H00285, H00286, |
| | more polynucleotides comprising a nucleotide sequence | H08348, H08349, N24725, N36706, N44806, N52179, N59471, N63112, |
| | described by the general formula of a-b, where a is any | N66486, N72051, W68534, W68821, W95493, W95530, AA055460, |
| | integer between 1 to 1625 of SEQ ID NO: 228, b is an | AA165066, AA164670, AA172036, AA172288, AA224152, AA256292, |
| | integer of 15 to 1639, where both a and b correspond to the | AA256434 |
| | positions of nucleotide residues shown in SEQ ID NO: 228, | |
| | and where b is greater than or equal to a + 14. | |
| 796590 | Preferably excluded from the present invention are one or | |
| | more polynucleotides comprising a nucleotide sequence | |
| | described by the general formula of a-b, where a is any | |
| | integer between 1 to 1069 of SEQ ID NO: 229, b is an | |
| | integer of 15 to 1083, where both a and b correspond to the | |
| | positions of nucleotide residues shown in SEQ ID NO: 229, | |
| | and where b is greater than or equal to a + 14. | |
| 799783 | Preferably excluded from the present invention are one or | |
| | more polynucleotides comprising a nucleotide sequence | |
| | described by the general formula of a-b, where a is any | |
| | integer between 1 to 345 of SEQ ID NO: 230, b is an | |
| | integer of 15 to 359, where both a and b correspond to the | |
| | positions of nucleotide residues shown in SEQ ID NO: 230, | |
| | and where b is greater than or equal to a + 14. | |
| 799784 | Preferably excluded from the present invention are one or | |
| | more polynucleotides comprising a nucleotide sequence | |
| | described by the general formula of a-b, where a is any | |
| | integer between 1 to 341 of SEQ ID NO: 231, b is an | |
| | integer of 15 to 355, where both a and b correspond to the | |
| | positions of nucleotide residues shown in SEQ ID NO: 231, | |
| | and where b is greater than or equal to a + 14. | |
| 799785 | Preferably excluded from the present invention are one or | |
| | more polynucleotides comprising a nucleotide sequence | |
| | described by the general formula of a-b, where a is any | |
| | integer between 1 to 360 of SEQ ID NO: 232, b is an | |
| | integer of 15 to 374, where both a and b correspond to the | |
| | positions of nucleotide residues shown in SEQ ID NO: 232, | |
| | and where b is greater than or equal to a + 14. | |
| 799786 | Preferably excluded from the present invention are one or | |
| | more polynucleotides comprising a nucleotide sequence | |
| | described by the general formula of a-b, where a is any | |
| | integer between 1 to 418 of SEQ ID NO: 233, b is an | |
| | integer of 15 to 432, where both a and b correspond to the | |
| | positions of nucleotide residues shown in SEQ ID NO: 233, | |
| | and where b is greater than or equal to a + 14. | |
| 799787 | Preferably excluded from the present invention are one or | |
| | more polynucleotides comprising a nucleotide sequence | |
| | described by the general formula of a-b, where a is any | |
| | integer between 1 to 352 of SEQ ID NO: 234, b is an | |
| | integer of 15 to 366, where both a and b correspond to the | |
| | positions of nucleotide residues shown in SEQ ID NO: 234, | |
| | and where b is greater than or equal to a + 14. | |
| 799800 | Preferably excluded from the present invention are one or | |
| | more polynucleotides comprising a nucleotide sequence | |
| | described by the general formula of a-b, where a is any | |
| | integer between 1 to 414 of SEQ ID NO: 235, b is an | |
| | integer of 15 to 428, where both a and b correspond to the | |
| | positions of nucleotide residues shown in SEQ ID NO: 235, | |
| | and where b is greater than or equal to a + 14. | |
| 799808 | Preferably excluded from the present invention are one or | W38424, W38440, W39289, W40123, W40239, W40423, W40223, W44752, |
| | more polynucleotides comprising a nucleotide sequence | W44840, W45263, W45310, W45466, W45478, W45484, W52088, W52399, |
| | described by the general formula of a-b, where a is any | W52587, W52966, W56192, W59966, W60273, W60443, W60621, W74243 |
| | integer between 1 to 952 of SEQ ID NO: 236, b is an | |
| | integer of 15 to 966, where both a and b correspond to the | |
| | positions of nucleotide residues shown in SEQ ID NO: 236, | |
| | and where b is greater than or equal to a + 14. | |
| 799977 | Preferably excluded from the present invention are one or | |
| | more polynucleotides comprising a nucleotide sequence | |
| | described by the general formula of a-b, where a is any | |
| | integer between 1 to 683 of SEQ ID NO: 237, b is an | |
| | integer of 15 to 697, where both a and b correspond to the | |
| | positions of nucleotide residues shown in SEQ ID NO: 237, | |
| | and where b is greater than or equal to a + 14. | |
| 800149 | Preferably excluded from the present invention are one or | |
| | more polynucleotides comprising a nucleotide sequence | |
| | described by the general formula of a-b, where a is any | |
| | integer between 1 to 2253 of SEQ ID NO: 238, b is an | |
| | integer of 15 to 2267, where both a and b correspond to the | |
| | positions of nucleotide residues shown in SEQ ID NO: 238, | |
| | and where b is greater than or equal to a + 14. | |
| 800189 | Preferably excluded from the present invention are one or | |
| | more polynucleotides comprising a nucleotide sequence | |
| | described by the general formula of a-b, where a is any | |
| | integer between 1 to 753 of SEQ ID NO: 239, b is an | |
| | integer of 15 to 767, where both a and b correspond to the | |
| | positions of nucleotide residues shown in SEQ ID NO: 239, | |
| | and where b is greater than or equal to a + 14. | |
| 800589 | Preferably excluded from the present invention are one or | |
| | more polynucleotides comprising a nucleotide sequence | |
| | described by the general formula of a-b, where a is any | |
| | integer between 1 to 1704 of SEQ ID NO: 240, b is an | |
| | integer of 15 to 1718, where both a and b correspond to the | |
| | positions of nucleotide residues shown in SEQ ID NO: 240, | |
| | and where b is greater than or equal to a + 14. | |
| 800811 | Preferably excluded from the present invention are one or | |
| | more polynucleotides comprising a nucleotide sequence | |
| | described by the general formula of a-b, where a is any | |
| | integer between 1 to 3585 of SEQ ID NO: 241, b is an | |
| | integer of 15 to 3599, where both a and b correspond to the | |
| | positions of nucleotide residues shown in SEQ ID NO: 241, | |
| | and where b is greater than or equal to a + 14. | |
| 800857 | Preferably excluded from the present invention are one or | |
| | more polynucleotides comprising a nucleotide sequence | |
| | described by the general formula of a-b, where a is any | |
| | integer between 1 to 2873 of SEQ ID NO: 242, b is an | |
| | integer of 15 to 2887, where both a and b correspond to the | |
| | positions of nucleotide residues shown in SEQ ID NO: 242, | |
| | and where b is greater than or equal to a + 14. | |
| 805721 | Preferably excluded from the present invention are one or | |
| | more polynucleotides comprising a nucleotide sequence | |
| | described by the general formula of a-b, where a is any | |
| | integer between 1 to 1239 of SEQ ID NO: 243, b is an | |
| | integer of 15 to 1253, where both a and b correspond to the | |
| | positions of nucleotide residues shown in SEQ ID NO: 243, | |
| | and where b is greater than or equal to a + 14. | |
| 805818 | Preferably excluded from the present invention are one or | R37467, R43162, R49031, R43162, H90387, AA161488 |
| | more polynucleotides comprising a nucleotide sequence | |
| | described by the general formula of a-b, where a is any | |
| | integer between 1 to 1588 of SEQ ID NO: 244, b is an | |
| | integer of 15 to 1602, where both a and b correspond to the | |
| | positions of nucleotide residues shown in SEQ ID NO: 244, | |
| | and where b is greater than or equal to a + 14. | |
| 806267 | Preferably excluded from the present invention are one or | |
| | more polynucleotides comprising a nucleotide sequence | |
| | described by the general formula of a-b, where a is any | |
| | integer between 1 to 1270 of SEQ ID NO: 245, b is an | |
| | integer of 15 to 1284, where both a and b correspond to the | |
| | positions of nucleotide residues shown in SEQ ID NO: 245, | |
| | and where b is greater than or equal to a + 14. | |
| 806579 | Preferably excluded from the present invention are one or | |
| | more polynucleotides comprising a nucleotide sequence | |
| | described by the general formula of a-b, where a is any | |
| | integer between 1 to 2080 of SEQ ID NO: 246, b is an | |
| | integer of 15 to 2094, where both a and b correspond to the | |
| | positions of nucleotide residues shown in SEQ ID NO: 246, | |
| | and where b is greater than or equal to a + 14. | |
| 810625 | Preferably excluded from the present invention are one or | |
| | more polynucleotides comprising a nucleotide sequence | |
| | described by the general formula of a-b, where a is any | |
| | integer between 1 to 1005 of SEQ ID NO: 247, b is an | |
| | integer of 15 to 1019, where both a and b correspond to the | |
| | positions of nucleotide residues shown in SEQ ID NO: 247, | |
| | and where b is greater than or equal to a + 14. | |
| 811153 | Preferably excluded from the present invention are one or | |
| | more polynucleotides comprising a nucleotide sequence | |
| | described by the general formula of a-b, where a is any | |
| | integer between 1 to 1486 of SEQ ID NO: 248, b is an | |
| | integer of 15 to 1500, where both a and b correspond to the | |
| | positions of nucleotide residues shown in SEQ ID NO: 248, | |
| | and where b is greater than or equal to a + 14. | |
| 811787 | Preferably excluded from the present invention are one or | |
| | more polynucleotides comprising a nucleotide sequence | |
| | described by the general formula of a-b, where a is any | |
| | integer between 1 to 2287 of SEQ ID NO: 249, b is an | |
| | integer of 15 to 2301, where both a and b correspond to the | |
| | positions of nucleotide residues shown in SEQ ID NO: 249, | |
| | and where b is greater than or equal to a + 14. | |
| 812314 | Preferably excluded from the present invention are one or | |
| | more polynucleotides comprising a nucleotide sequence | |
| | described by the general formula of a-b, where a is any | |
| | integer between 1 to 2103 of SEQ ID NO: 250, b is an | |
| | integer of 15 to 2117, where both a and b correspond to the | |
| | positions of nucleotide residues shown in SEQ ID NO: 250, | |
| | and where b is greater than or equal to a + 14. | |
| 812443 | Preferably excluded from the present invention are one or | |
| | more polynucleotides comprising a nucleotide sequence | |
| | described by the general formula of a-b, where a is any | |
| | integer between 1 to 1432 of SEQ ID NO: 251, b is an | |
| | integer of 15 to 1446, where both a and b correspond to the | |
| | positions of nucleotide residues shown in SEQ ID NO: 251, | |
| | and where b is greater than or equal to a + 14. | |
| 812498 | Preferably excluded from the present invention are one or | |
| | more polynucleotides comprising a nucleotide sequence | |
| | described by the general formula of a-b, where a is any | |
| | integer between 1 to 2036 of SEQ ID NO: 252, b is an | |
| | integer of 15 to 2050, where both a and b correspond to the | |
| | positions of nucleotide residues shown in SEQ ID NO: 252, | |
| | and where b is greater than or equal to a + 14. | |
| 812504 | Preferably excluded from the present invention are one or | |
| | more polynucleotides comprising a nucleotide sequence | |
| | described by the general formula of a-b, where a is any | |
| | integer between 1 to 2515 of SEQ ID NO: 253, b is an | |
| | integer of 15 to 2529, where both a and b correspond to the | |
| | positions of nucleotide residues shown in SEQ ID NO: 253, | |
| | and where b is greater than or equal to a + 14. | |
| 813079 | Preferably excluded from the present invention are one or | |
| | more polynucleotides comprising a nucleotide sequence | |
| | described by the general formula of a-b, where a is any | |
| | integer between 1 to 1664 of SEQ ID NO: 254, b is an | |
| | integer of 15 to 1678, where both a and b correspond to the | |
| | positions of nucleotide residues shown in SEQ ID NO: 254, | |
| | and where b is greater than or equal to a + 14. | |
| 815889 | Preferably excluded from the present invention are one or | R75777, R81161, H89597, N66387, AA031510, AA031511, AA046590, |
| | more polynucleotides comprising a nucleotide sequence | AA046523, AA114840, AA114841, AA262053, AA459986, AA460079 |
| | described by the general formula of a-b, where a is any | |
| | integer between 1 to 952 of SEQ ID NO: 255, b is an | |
| | integer of 15 to 966, where both a and b correspond to the | |
| | positions of nucleotide residues shown in SEQ ID NO: 255, | |
| | and where b is greater than or equal to a + 14. | |
| 824358 | Preferably excluded from the present invention are one or | |
| | more polynucleotides comprising a nucleotide sequence | |
| | described by the general formula of a-b, where a is any | |
| | integer between 1 to 3077 of SEQ ID NO: 256, b is an | |
| | integer of 15 to 3091, where both a and b correspond to the | |
| | positions of nucleotide residues shown in SEQ ID NO: 256, | |
| | and where b is greater than or equal to a + 14. | |
| 826144 | Preferably excluded from the present invention are one or | T49872, R13469, R14630, R37379, R53048, R53135, R66676, R67394, |
| | more polynucleotides comprising a nucleotide sequence | R68165, R73097, R73098, H05459, H07010, H10504, H14581, H14671, |
| | described by the general formula of a-b, where a is any | H54297, H54374, H60845, H60931, H67688, H68011, N20226, N21171, |
| | integer between 1 to 2938 of SEQ ID NO: 257, b is an | N26851, N29134, N29294, N29562, N42173, AA026121, AA026205, |
| | integer of 15 to 2952, where both a and b correspond to the | AA136924, AA137020, AA460265, AA463830 |
| | positions of nucleotide residues shown in SEQ ID NO: 257, | |
| | and where b is greater than or equal to a + 14. | |
| 826558 | Preferably excluded from the present invention are one or | T93500, R30805, R34197, R66925, R66924, H00931, H01734, H02282, |
| | more polynucleotides comprising a nucleotide sequence | H02385, W52225, AA040653, AA045530, AA058953, AA059458, |
| | described by the general formula of a-b, where a is any | AA127997, AA128093 |
| | integer between 1 to 2203 of SEQ ID NO: 258, b is an | |
| | integer of 15 to 2217, where both a and b correspond to the | |
| | positions of nucleotide residues shown in SEQ ID NO: 258, | |
| | and where b is greater than or equal to a + 14. | |
| 827471 | Preferably excluded from the present invention are one or | |
| | more polynucleotides comprising a nucleotide sequence | |
| | described by the general formula of a-b, where a is any | |
| | integer between 1 to 1226 of SEQ ID NO: 259, b is an | |
| | integer of 15 to 1240, where both a and b correspond to the | |
| | positions of nucleotide residues shown in SEQ ID NO: 259, | |
| | and where b is greater than or equal to a + 14. | |
| 827716 | Preferably excluded from the present invention are one or | |
| | more polynucleotides comprising a nucleotide sequence | |
| | described by the general formula of a-b, where a is any | |
| | integer between 1 to 596 of SEQ ID NO: 260, b is an | |
| | integer of 15 to 610, where both a and b correspond to the | |
| | positions of nucleotide residues shown in SEQ ID NO: 260, | |
| | and where b is greater than or equal to a + 14. | |
| 827722 | Preferably excluded from the present invention are one or | |
| | more polynucleotides comprising a nucleotide sequence | |
| | described by the general formula of a-b, where a is any | |
| | integer between 1 to 2102 of SEQ ID NO: 261, b is an | |
| | integer of 15 to 2116, where both a and b correspond to the | |
| | positions of nucleotide residues shown in SEQ ID NO: 261, | |
| | and where b is greater than or equal to a + 14. | |
| 827727 | Preferably excluded from the present invention are one or | |
| | more polynucleotides comprising a nucleotide sequence | |
| | described by the general formula of a-b, where a is any | |
| | integer between 1 to 1543 of SEQ ID NO: 262, b is an | |
| | integer of 15 to 1557, where both a and b correspond to the | |
| | positions of nucleotide residues shown in SEQ ID NO: 262, | |
| | and where b is greater than or equal to a + 14. | |
| 828238 | Preferably excluded from the present invention are one or | AA193057, AA459842 |
| | more polynucleotides comprising a nucleotide sequence | |
| | described by the general formula of a-b, where a is any | |
| | integer between 1 to 1640 of SEQ ID NO: 263, b is an | |
| | integer of 15 to 1654, where both a and b correspond to the | |
| | positions of nucleotide residues shown in SEQ ID NO: 263, | |
| | and where b is greater than or equal to a + 14. | |
| 828573 | Preferably excluded from the present invention are one or | W21349, AA287428, AA488879, AA736676, AA825689, AA831957 |
| | more polynucleotides comprising a nucleotide sequence | |
| | described by the general formula of a-b, where a is any | |
| | integer between 1 to 1154 of SEQ ID NO: 264, b is an | |
| | integer of 15 to 1168, where both a and b correspond to the | |
| | positions of nucleotide residues shown in SEQ ID NO: 264, | |
| | and where b is greater than or equal to a + 14. | |
| 828624 | Preferably excluded from the present invention are one or | T80978, T80979, R63642, R63643, H50751, AA130349, AA130348, |
| | more polynucleotides comprising a nucleotide sequence | AA228511, AA229376, AA558367, AA588171, AA602572, AA902186, |
| | described by the general formula of a-b, where a is any | AA907305 |
| | integer between 1 to 1743 of SEQ ID NO: 265, b is an | |
| | integer of 15 to 1757, where both a and b correspond to the | |
| | positions of nucleotide residues shown in SEQ ID NO: 265, | |
| | and where b is greater than or equal to a + 14. | |
| 828656 | Preferably excluded from the present invention are one or | |
| | more polynucleotides comprising a nucleotide sequence | |
| | described by the general formula of a-b, where a is any | |
| | integer between 1 to 400 of SEQ ID NO: 266, b is an | |
| | integer of 15 to 414, where both a and b correspond to the | |
| | positions of nucleotide residues shown in SEQ ID NO: 266, | |
| | and where b is greater than or equal to a + 14. | |
| 828848 | Preferably excluded from the present invention are one or | W74302, C06154 |
| | more polynucleotides comprising a nucleotide sequence | |
| | described by the general formula of a-b, where a is any | |
| | integer between 1 to 1438 of SEQ ID NO: 267, b is an | |
| | integer of 15 to 1452, where both a and b correspond to the | |
| | positions of nucleotide residues shown in SEQ ID NO: 267, | |
| | and where b is greater than or equal to a + 14. | |
| 828929 | Preferably excluded from the present invention are one or | T71649, T66629, T82072, R16043, R18568, R25675, R27534, R37452, |
| | more polynucleotides comprising a nucleotide sequence | R37893, R49608, R49608, H00371, H04032, H15066, H15067, H17442, |
| | described by the general formula of a-b, where a is any | H25765, H25806, H42041, H42082, H98813, N21069, N26797, N27904, |
| | integer between 1 to 3045 of SEQ ID NO: 268, b is an | N30299, N32783, N35448, N39486, N41546, N42023, N47272, N48586, |
| | integer of 15 to 3059, where both a and b correspond to the | N51988, N53717, N62255, N72265, N95532, N95535, W02978, W24224, |
| | positions of nucleotide residues shown in SEQ ID NO: 268, | W24221, W37457, W49675, W49769, W94843, AA011118, AA017107, |
| | and where b is greater than or equal to a + 14. | AA026474, AA026566, AA043220, AA053225, AA059038, AA127381, |
| | | AA135518, AA135579, AA160002, AA161212, AA250957, AA251069, |
| | | AA256560 |
| 829008 | Preferably excluded from the present invention are one or | |
| | more polynucleotides comprising a nucleotide sequence | |
| | described by the general formula of a-b, where a is any | |
| | integer between 1 to 750 of SEQ ID NO: 269, b is an | |
| | integer of 15 to 764, where both a and b correspond to the | |
| | positions of nucleotide residues shown in SEQ ID NO: 269, | |
| | and where b is greater than or equal to a + 14. | |
| 829086 | Preferably excluded from the present invention are one or | |
| | more polynucleotides comprising a nucleotide sequence | |
| | described by the general formula of a-b, where a is any | |
| | integer between 1 to 518 of SEQ ID NO: 270, b is an | |
| | integer of 15 to 532, where both a and b correspond to the | |
| | positions of nucleotide residues shown in SEQ ID NO: 270, | |
| | and where b is greater than or equal to a + 14. | |
| 829192 | Preferably excluded from the present invention are one or | R01014, R18033, R68910, R99809, H52663, N58651, AA088731, AA193513, |
| | more polynucleotides comprising a nucleotide sequence | AA193662 |
| | described by the general formula of a-b, where a is any | |
| | integer between 1 to 1383 of SEQ ID NO: 271, b is an | |
| | integer of 15 to 1397, where both a and b correspond to the | |
| | positions of nucleotide residues shown in SEQ ID NO: 271, | |
| | and where b is greater than or equal to a + 14. | |
| 829310 | Preferably excluded from the present invention are one or | AA083295 |
| | more polynucleotides comprising a nucleotide sequence | |
| | described by the general formula of a-b, where a is any | |
| | integer between 1 to 513 of SEQ ID NO: 272, b is an | |
| | integer of 15 to 527, where both a and b correspond to the | |
| | positions of nucleotide residues shown in SEQ ID NO: 272, | |
| | and where b is greater than or equal to a + 14. | |
| 829319 | Preferably excluded from the present invention are one or | T90645, T90659, T97985, H06506, H19818, H20153, H20246, H21116, |
| | more polynucleotides comprising a nucleotide sequence | H21159, H21858, H41323, H41571, H42403, H42408, H42409, H42924, |
| | described by the general formula of a-b, where a is any | H42925, H44900, H46556, H50437, H50438, AA099620, AA102013, |
| | integer between 1 to 791 of SEQ ID NO: 273, b is an | AA148703, AA148704 |
| | integer of 15 to 805, where both a and b correspond to the | |
| | positions of nucleotide residues shown in SEQ ID NO: 273, | |
| | and where b is greater than or equal to a + 14. | |
| 829459 | Preferably excluded from the present invention are one or | R09386, R09387, T78025, T97831, R23957, R23958, R24288, R24397, |
| | more polynucleotides comprising a nucleotide sequence | R26402, R28352, R28556, R28581, R63909, R63994, H02219, H04307, |
| | described by the general formula of a-b, where a is any | H04347, H06295, H06351, H13627, H13626, R84897, R85842, R98471, |
| | integer between 1 to 1939 of SEQ ID NO: 274, b is an | R98515, H72345, H81180, H95281, H95334, H99164, N29733, W03364, |
| | integer of 15 to 1953, where both a and b correspond to the | W47102, W47226, W92469, AA010223, AA011481, AA011482, AA016315, |
| | positions of nucleotide residues shown in SEQ ID NO: 274, | AA018837, AA101692, AA101805, AA101807, AA122274, AA121645, |
| | and where b is greater than or equal to a + 14. | AA151559, AA149649, AA195694, AA195725, AA227519, AA232778, |
| | | AA233860, AA234917, AA234918, AA253354, AA253355, AA258326, |
| | | AA258535 |
| 829527 | Preferably excluded from the present invention are one or | T58131, T63068, T90761, T80172, T83210, T96126, T96208, R02011, |
| | more polynucleotides comprising a nucleotide sequence | R02010, R13993, R37587, R39116, R49772, 1104979, H04978, H10390, |
| | described by the general formula of a-b, where a is any | H10599, H25348, R89064, R89161, W40553, W42765, W57719, W57718, |
| | integer between 1 to 2362 of SEQ ID NO: 275, b is an | AA125861, AA125860, AA187443, AA187617, AA234055, AA430020 |
| | integer of 15 to 2376, where both a and b correspond to the | |
| | positions of nucleotide residues shown in SEQ ID NO: 275, | |
| | and where b is greater than or equal to a + 14. | |
| 829736 | Preferably excluded from the present invention are one or | T49267, T49268, T49304, T49305, T63879, T80451, T81311, T81839, |
| | more polynucleotides comprising a nucleotide sequence | T83362, T83508, T95341, T95436, R22333, R25604, R34248, R35407, |
| | described by the general formula of a-b, where a is any | R35574, R49204, R49204, R62803, R62852, H13144, H17521, H44982, |
| | integer between 1 to 2425 of SEQ ID NO: 276, b is an | R93505, R93504, H98806, N24673, N25026, N32953, N33048, N35464, |
| | integer of 15 to 2439, where both a and b correspond to the | N42110, N42625, N55468, N76843, W03837, AA056568, AA056719, |
| | positions of nucleotide residues shown in SEQ ID NO: 276, | AA150946, AA151038, AA165138, AA169548, AA169352, AA171757, |
| | and where b is greater than or equal to a + 14. | AA171713, AA171996, AA172106, AA235604, AA424478 |
| 830552 | Preferably excluded from the present invention are one or | |
| | more polynucleotides comprising a nucleotide sequence | |
| | described by the general formula of a-b, where a is any | |
| | integer between 1 to 1875 of SEQ ID NO: 277, b is an | |
| | integer of 15 to 1889, where both a and b correspond to the | |
| | positions of nucleotide residues shown in SEQ ID NO: 277, | |
| | and where b is greater than or equal to a + 14. | |
| 830566 | Preferably excluded from the present invention are one or | H58586 |
| | more polynucleotides comprising a nucleotide sequence | |
| | described by the general formula of a-b, where a is any | |
| | integer between 1 to 622 of SEQ ID NO: 278, b is an | |
| | integer of 15 to 636, where both a and b correspond to the | |
| | positions of nucleotide residues shown in SEQ ID NO: 278, | |
| | and where b is greater than or equal to a + 14. | |
| 830568 | Preferably excluded from the present invention are one or | T86173, T86174, R31229, R56392, H27334, H41900. H41939, N41528, |
| | more polynucleotides comprising a nucleotide sequence | AA464551, AA464652, AA425346, AA430320, AA514778, AA551699, |
| | described by the general formula of a-b, where a is any | AA558620, AA558725, AA583577, AA612719, AA574033, AA746483, |
| | integer between 1 to 2847 of SEQ ID NO: 279, b is an | AA808281, AA831559, AA873069, AA878486, W22260, W22881, N88548, |
| | integer of 15 to 2861, where both a and b correspond to the | C04008, C04877, C05565 |
| | positions of nucleotide residues shown in SEQ ID NO: 279, | |
| | and where b is greater than or equal to a + 14. | |
| 830569 | Preferably excluded from the present invention are one or | AA148863, AA148864 |
| | more polynucleotides comprising a nucleotide sequence | |
| | described by the general formula of a-b, where a is any | |
| | integer between 1 to 1492 of SEQ ID NO: 280, b is an | |
| | integer of 15 to 1506, where both a and b correspond to the | |
| | positions of nucleotide residues shown in SEQ ID NO: 280, | |
| | and where b is greater than or equal to a + 14. | |
| 830583 | Preferably excluded from the present invention are one or | |
| | more polynucleotides comprising a nucleotide sequence | |
| | described by the general formula of a-b, where a is any | |
| | integer between 1 to 1679 of SEQ ID NO: 281, b is an | |
| | integer of 15 to 1693, where both a and b correspond to the | |
| | positions of nucleotide residues shown in SEQ ID NO: 281, | |
| | and where b is greater than or equal to a + 14. | |
| 830613 | Preferably excluded from the present invention are one or | |
| | more polynucleotides comprising a nucleotide sequence | |
| | described by the general formula of a-b, where a is any | |
| | integer between 1 to 1209 of SEQ ID NO: 282, b is an | |
| | integer of 15 to 1223, where both a and b correspond to the | |
| | positions of nucleotide residues shown in SEQ ID NO: 282, | |
| | and where b is greater than or equal to a + 14. | |
| 830686 | Preferably excluded from the present invention are one or | |
| | more polynucleotides comprising a nucleotide sequence | |
| | described by the general formula of a-b, where a is any | |
| | integer between 1 to 476 of SEQ ID NO: 283, b is an | |
| | integer of 15 to 490, where both a and b correspond to the | |
| | positions of nucleotide residues shown in SEQ ID NO: 283, | |
| | and where b is greater than or equal to a + 14. | |
| 830691 | Preferably excluded from the present invention are one or | T64847, T72590, R21403, R46500, R46500, R59229, R59289, H30531, |
| | more polynucleotides comprising a nucleotide sequence | H40605, H46249, H46370, H49841, H91758, AA125799, AA135387, |
| | described by the general formula of a-b, where a is any | AA135994, AA464935, AA424273, AA568294, AA810246, D80751, D81702, |
| | integer between 1 to 2995 of SEQ ID NO: 284, b is an | AA092153 |
| | integer of 15 to 3009, where both a and b correspond to the | |
| | positions of nucleotide residues shown in SEQ ID NO: 284, | |
| | and where b is greater than or equal to a + 14. | |
| 830716 | Preferably excluded from the present invention are one or | |
| | more polynucleotides comprising a nucleotide sequence | |
| | described by the general formula of a-b, where a is any | |
| | integer between 1 to 862 of SEQ ID NO: 285, b is an | |
| | integer of 15 to 876, where both a and b correspond to the | |
| | positions of nucleotide residues shown in SEQ ID NO: 285, | |
| | and where b is greater than or equal to a + 14. | |
| 830792 | Preferably excluded from the present invention are one or | |
| | more polynucleotides comprising a nucleotide sequence | |
| | described by the general formula of a-b, where a is any | |
| | integer between 1 to 847 of SEQ ID NO: 286, b is an | |
| | integer of 15 to 861, where both a and b correspond to the | |
| | positions of nucleotide residues shown in SEQ ID NO: 286, | |
| | and where b is greater than or equal to a + 14. | |
| 830893 | Preferably excluded from the present invention are one or | |
| | more polynucleotides comprising a nucleotide sequence | |
| | described by the general formula of a-b, where a is any | |
| | integer between 1 to 1054 of SEQ ID NO: 287, b is an | |
| | integer of 15 to 1068, where both a and b correspond to the | |
| | positions of nucleotide residues shown in SEQ ID NO: 287, | |
| | and where b is greater than or equal to a + 14. | |
| 830976 | Preferably excluded from the present invention are one or | |
| | more polynucleotides comprising a nucleotide sequence | |
| | described by the general formula of a-b, where a is any | |
| | integer between 1 to 2242 of SEQ ID NO: 288, b is an | |
| | integer of 15 to 2256, where both a and b correspond to the | |
| | positions of nucleotide residues shown in SEQ ID NO: 288, | |
| | and where b is greater than or equal to a + 14. | |
| 831043 | Preferably excluded from the present invention are one or | |
| | more polynucleotides comprising a nucleotide sequence | |
| | described by the general formula of a-b, where a is any | |
| | integer between 1 to 317 of SEQ ID NO: 289, b is an | |
| | integer of 15 to 331, where both a and b correspond to the | |
| | positions of nucleotide residues shown in SEQ ID NO: 289, | |
| | and where b is greater than or equal to a + 14. | |
| 831131 | Preferably excluded from the present invention are one or | |
| | more polynucleotides comprising a nucleotide sequence | |
| | described by the general formula of a-b, where a is any | |
| | integer between 1 to 691 of SEQ ID NO: 290, b is an | |
| | integer of 15 to 705, where both a and b correspond to the | |
| | positions of nucleotide residues shown in SEQ ID NO: 290, | |
| | and where b is greater than or equal to a + 14. | |
| 831164 | Preferably excluded from the present invention are one or | T74499, R12051, R18399, R60836, H15297, H18858, H23172, AA721309, |
| | more polynucleotides comprising a nucleotide sequence | AA831174, C04626 |
| | described by the general formula of a-b, where a is any | |
| | integer between 1 to 938 of SEQ ID NO: 291, b is an | |
| | integer of 15 to 952, where both a and b correspond to the | |
| | positions of nucleotide residues shown in SEQ ID NO: 291, | |
| | and where b is greater than or equal to a + 14. | |
| 831173 | Preferably excluded from the present invention are one or | |
| | more polynucleotides comprising a nucleotide sequence | |
| | described by the general formula of a-b, where a is any | |
| | integer between 1 to 590 of SEQ ID NO: 292, b is an | |
| | integer of 15 to 604, where both a and b correspond to the | |
| | positions of nucleotide residues shown in SEQ ID NO: 292, | |
| | and where b is greater than or equal to a + 14. | |
| 831255 | Preferably excluded from the present invention are one or | |
| | more polynucleotides comprising a nucleotide sequence | |
| | described by the general formula of a-b, where a is any | |
| | integer between 1 to 496 of SEQ ID NO: 293, b is an | |
| | integer of 15 to 510, where both a and b correspond to the | |
| | positions of nucleotide residues shown in SEQ ID NO: 293, | |
| | and where b is greater than or equal to a + 14. | |
| 831327 | Preferably excluded from the present invention are one or | W38432, W44821, W51893, W51781, W52725, W59978, W60116, |
| | more polynucleotides comprising a nucleotide sequence | AA588704, C05911, C05915 |
| | described by the general formula of a-b, where a is any | |
| | integer between 1 to 831 of SEQ ID NO: 294, b is an | |
| | integer of 15 to 845, where both a and b correspond to the | |
| | positions of nucleotide residues shown in SEQ ID NO: 294, | |
| | and where b is greater than or equal to a + 14. | |
| 831493 | Preferably excluded from the present invention are one or | |
| | more polynucleotides comprising a nucleotide sequence | |
| | described by the general formula of a-b, where a is any | |
| | integer between 1 to 1032 of SEQ ID NO: 295, b is an | |
| | integer of 15 to 1046, where both a and b correspond to the | |
| | positions of nucleotide residues shown in SEQ ID NO: 295, | |
| | and where b is greater than or equal to a + 14. | |
| 831500 | Preferably excluded from the present invention are one or | T67004, T67005, R06266, R06324, R55532, R55533, W60669, W60670, |
| | more polynucleotides comprising a nucleotide sequence | W96122, W96123, AA551364, AA553611, AA570432 |
| | described by the general formula of a-b, where a is any | |
| | integer between 1 to 1902 of SEQ ID NO: 296, b is an | |
| | integer of 15 to 1916, where both a and b correspond to the | |
| | positions of nucleotide residues shown in SEQ ID NO: 296, | |
| | and where b is greater than or equal to a + 14. | |
| 831501 | Preferably excluded from the present invention are one or | R52091, H14837, AA023003, AA022470, AA232097, AA256032, AA258844, |
| | more polynucleotides comprising a nucleotide sequence | AA259023, AA424828, AA557330, AA765793 |
| | described by the general formula of a-b, where a is any | |
| | integer between 1 to 1462 of SEQ ID NO: 297, b is an | |
| | integer of 15 to 1476, where both a and b correspond to the | |
| | positions of nucleotide residues shown in SEQ ID NO: 297, | |
| | and where b is greater than or equal to a + 14. | |
| 831502 | Preferably excluded from the present invention are one or | |
| | more polynucleotides comprising a nucleotide sequence | |
| | described by the general formula of a-b, where a is any | |
| | integer between 1 to 527 of SEQ ID NO: 298, b is an | |
| | integer of 15 to 541, where both a and b correspond to the | |
| | positions of nucleotide residues shown in SEQ ID NO: 298, | |
| | and where b is greater than or equal to a + 14. | |
| 831508 | Preferably excluded from the present invention are one or | |
| | more polynucleotides comprising a nucleotide sequence | |
| | described by the general formula of a-b, where a is any | |
| | integer between 1 to 457 of SEQ ID NO: 299, b is an | |
| | integer of 15 to 471, where both a and b correspond to the | |
| | positions of nucleotide residues shown in SEQ ID NO: 299, | |
| | and where b is greater than or equal to a + 14. | |
| 831509 | Preferably excluded from the present invention are one or | |
| | more polynucleotides comprising a nucleotide sequence | |
| | described by the general formula of a-b, where a is any | |
| | integer between 1 to 928 of SEQ ID NO: 300, b is an | |
| | integer of 15 to 942, where both a and b correspond to the | |
| | positions of nucleotide residues shown in SEQ ID NO: 300, | |
| | and where b is greater than or equal to a + 14. | |
| 831520 | Preferably excluded from the present invention are one or | |
| | more polynucleotides comprising a nucleotide sequence | |
| | described by the general formula of a-b, where a is any | |
| | integer between 1 to 447 of SEQ ID NO: 301, b is an | |
| | integer of 15 to 461, where both a and b correspond to the | |
| | positions of nucleotide residues shown in SEQ ID NO: 301, | |
| | and where b is greater than or equal to a + 14. | |
| 831547 | Preferably excluded from the present invention are one or | R09826, T95977, T97888, H66377, W31141 |
| | more polynucleotides comprising a nucleotide sequence | |
| | described by the general formula of a-b, where a is any | |
| | integer between 1 to 892 of SEQ ID NO: 302, b is an | |
| | integer of 15 to 906, where both a and b correspond to the | |
| | positions of nucleotide residues shown in SEQ ID NO: 302, | |
| | and where b is greater than or equal to a + 14. | |
| 831548 | Preferably excluded from the present invention are one or | T95880, T97781, R05685, R12413, R37130, R37412, R94523, H82826, |
| | more polynucleotides comprising a nucleotide sequence | H99806, H99813, AA172251, AA468699, AA659754, AA808925, AA837298, |
| | described by the general formula of a-b, where a is any | AA858110, AA864723, AA954263, F18115, N99864 |
| | integer between 1 to 606 of SEQ ID NO: 303, b is an | |
| | integer of 15 to 620, where both a and b correspond to the | |
| | positions of nucleotide residues shown in SEQ ID NO: 303. | |
| | and where b is greater than or equal to a + 14. | |
| 831558 | Preferably excluded from the present invention are one or | H60157, W57916, W57917, AA056029, AA056047. AA142858, AA211887, |
| | more polynucleotides comprising a nucleotide sequence | AA469104, AA659257, AA662867, AA665372, AA728846, AA933045, |
| | described by the general formula of a-b, where a is any | F17890, AA090265 |
| | integer between 1 to 519 of SEQ ID NO: 304, b is an | |
| | integer of 15 to 533, where both a and b correspond to the | |
| | positions of nucleotide residues shown in SEQ ID NO: 304, | |
| | and where b is greater than or equal to a + 14. | |
| 831847 | Preferably excluded from the present invention are one or | |
| | more polynucleotides comprising a nucleotide sequence | |
| | described by the general formula of a-b, where a is any | |
| | integer between 1 to 1360 of SEQ ID NO: 305, b is an | |
| | integer of 15 to 1374, where both a and b correspond to the | |
| | positions of nucleotide residues shown in SEQ ID NO: 305, | |
| | and where b is greater than or equal to a + 14. | |
| 831893 | Preferably excluded from the present invention are one or | |
| | more polynucleotides comprising a nucleotide sequence | |
| | described by the general formula of a-b, where a is any | |
| | integer between 1 to 654 of SEQ ID NO: 306, b is an | |
| | integer of 15 to 668, where both a and b correspond to the | |
| | positions of nucleotide residues shown in SEQ ID NO: 306, | |
| | and where b is greater than or equal to a + 14. | |
| 831903 | Preferably excluded from the present invention are one or | |
| | more polynucleotides comprising a nucleotide sequence | |
| | described by the general formula of a-b, where a is any | |
| | integer between 1 to 1032 of SEQ ID NO: 307, b is an | |
| | integer of 15 to 1046, where both a and b correspond to the | |
| | positions of nucleotide residues shown in SEQ ID NO: 307, | |
| | and where b is greater than or equal to a + 14. | |
| 831921 | Preferably excluded from the present invention are one or | H52554, H66743, H71667, N32238, N77727, W19857, AA017111, |
| | more polynucleotides comprising a nucleotide sequence | AA074918, A235917, AA236708 |
| | described by the general formula of a-b, where a is any | |
| | integer between 1 to 1672 of SEQ ID NO: 308, b is an | |
| | integer of 15 to 1686, where both a and b correspond to the | |
| | positions of nucleotide residues shown in SEQ ID NO: 308, | |
| | and where b is greater than or equal to a + 14. | |
| 831923 | Preferably excluded from the present invention are one or | |
| | more polynucleotides comprising a nucleotide sequence | |
| | described by the general formula of a-b, where a is any | |
| | integer between 1 to 1412 of SEQ ID NO: 309, b is an | |
| | integer of 15 to 1426, where both a and b correspond to the | |
| | positions of nucleotide residues shown in SEQ ID NO: 309, | |
| | and where b is greater than or equal to a + 14. | |
| 831959 | Preferably excluded from the present invention are one or | |
| | more polynucleotides comprising a nucleotide sequence | |
| | described by the general formula of a-b, where a is any | |
| | integer between 1 to 1479 of SEQ ID NO: 310, b is an | |
| | integer of 15 to 1493, where both a and b correspond to the | |
| | positions of nucleotide residues shown in SEQ ID NO: 310, | |
| | and where b is greater than or equal to a + 14. | |
| 832008 | Preferably excluded from the present invention are one or | |
| | more polynucleotides comprising a nucleotide sequence | |
| | described by the general formula of a-b, where a is any | |
| | integer between 1 to 2328 of SEQ ID NO: 311, b is an | |
| | integer of 15 to 2342, where both a and b correspond to the | |
| | positions of nucleotide residues shown in SEQ ID NO: 311, | |
| | and where b is greater than or equal to a + 14. | |
| 832107 | Preferably excluded from the present invention are one or | N38762, W81128, W81129 |
| | more polynucleotides comprising a nucleotide sequence | |
| | described by the general formula of a-b, where a is any | |
| | integer between 1 to 840 of SEQ ID NO: 312, b is an | |
| | integer of 15 to 854, where both a and b correspond to the | |
| | positions of nucleotide residues shown in SEQ ID NO: 312, | |
| | and where b is greater than or equal to a + 14. | |
| 832110 | Preferably excluded from the present invention are one or | W72867, W76102, AA557708 |
| | more polynucleotides comprising a nucleotide sequence | |
| | described by the general formula of a-b, where a is any | |
| | integer between 1 to 1487 of SEQ ID NO: 313, b is an | |
| | integer of 15 to 1501, where both a and b correspond to the | |
| | positions of nucleotide residues shown in SEQ ID NO: 313, | |
| | and where b is greater than or equal to a + 14. | |
| 832146 | Preferably excluded from the present invention are one or | |
| | more polynucleotides comprising a nucleotide sequence | |
| | described by the general formula of a-b, where a is any | |
| | integer between 1 to 1179 of SEQ ID NO: 314, b is an | |
| | integer of 15 to 1193, where both a and b correspond to the | |
| | positions of nucleotide residues shown in SEQ ID NO: 314, | |
| | and where b is greater than or equal to a + 14. | |
| 832189 | Preferably excluded from the present invention are one or | AA004742, AA236306 |
| | more polynucleotides comprising a nucleotide sequence | |
| | described by the general formula of a-b, where a is any | |
| | integer between 1 to 784 of SEQ ID NO: 315, b is an | |
| | integer of 15 to 798, where both a and b correspond to the | |
| | positions of nucleotide residues shown in SEQ ID NO: 315, | |
| | and where b is greater than or equal to a + 14. | |
| 832295 | Preferably excluded from the present invention are one or | H21746, H21943, H39580, AA455263, AA455264, AA465644, AA563903, |
| | more polynucleotides comprising a nucleotide sequence | AA576922, AA661801, AA747311, AA767674, AA933667, AI088750 |
| | described by the general formula of a-b, where a is any | |
| | integer between 1 to 1921 of SEQ ID NO: 316, b is an | |
| | integer of 15 to 1935, where both a and b correspond to the | |
| | positions of nucleotide residues shown in SEQ ID NO: 316, | |
| | and where b is greater than or equal to a + 14. | |
| 832334 | Preferably excluded from the present invention are one or | |
| | more polynucleotides comprising a nucleotide sequence | |
| | described by the general formula of a-b, where a is any | |
| | integer between 1 to 1724 of SEQ ID NO: 317, b is an | |
| | integer of 15 to 1738, where both a and b correspond to the | |
| | positions of nucleotide residues shown in SEQ ID NO: 317, | |
| | and where b is greater than or equal to a + 14. | |
| 832339 | Preferably excluded from the present invention are one or | |
| | more polynucleotides comprising a nucleotide sequence | |
| | described by the general formula of a-b, where a is any | |
| | integer between 1 to 1326 of SEQ ID NO: 318, b is an | |
| | integer of 15 to 1340, where both a and b correspond to the | |
| | positions of nucleotide residues shown in SEQ ID NO: 318, | |
| | and where b is greater than or equal to a + 14. | |
| 832393 | Preferably excluded from the present invention are one or | |
| | more polynucleotides comprising a nucleotide sequence | |
| | described by the general formula of a-b, where a is any | |
| | integer between 1 to 770 of SEQ ID NO: 319, b is an | |
| | integer of 15 to 784, where both a and b correspond to the | |
| | positions of nucleotide residues shown in SEQ ID NO: 319, | |
| | and where b is greater than or equal to a + 14. | |
| 832415 | Preferably excluded from the present invention are one or | T65740, R78913, R79012, R82303, R82302, H13769, H81248, H81589, |
| | more polynucleotides comprising a nucleotide sequence | H88099, H95138, H97042, H81589, N21407, N25252, N29919, N31363, |
| | described by the general formula of a-b, where a is any | N33888, N42972, N50375, N51590, W38583, W69205, W69309, W73506, |
| | integer between 1 to 3513 of SEQ ID NO: 320, b is an | W73337, N90198, AA099534, AA099533, AA173671, AA173689, AA252476 |
| | integer of 15 to 3527, where both a and b correspond to the | |
| | positions of nucleotide residues shown in SEQ ID NO: 320, | |
| | and where b is greater than or equal to a + 14. | |
| 832422 | Preferably excluded from the present invention are one or | T99380, T99603, N31610, N32587, N42671, N47813, AA009818, AA009819, |
| | more polynucleotides comprising a nucleotide sequence | AA166785, AA166950, AA507182, AA569843, D78758, C04932 |
| | described by the general formula of a-b, where a is any | |
| | integer between 1 to 1435 of SEQ ID NO: 321, b is an | |
| | integer of 15 to 1449, where both a and b correspond to the | |
| | positions of nucleotide residues shown in SEQ ID NO: 321, | |
| | and where b is greater than or equal to a + 14. | |
| 832448 | Preferably excluded from the present invention are one or | |
| | more polynucleotides comprising a nucleotide sequence | |
| | described by the general formula of a-b, where a is any | |
| | integer between 1 to 763 of SEQ ID NO: 322, b is an | |
| | integer of 15 to 777, where both a and b correspond to the | |
| | positions of nucleotide residues shown in SEQ ID NO: 322, | |
| | and where b is greater than or equal to a + 14. | |
| 832532 | Preferably excluded from the present invention are one or | |
| | more polynucleotides comprising a nucleotide sequence | |
| | described by the general formula of a-b, where a is any | |
| | integer between 1 to 1200 of SEQ ID NO: 323, b is an | |
| | integer of 15 to 1214, where both a and b correspond to the | |
| | positions of nucleotide residues shown in SEQ ID NO: 323, | |
| | and where b is greater than or equal to a + 14. | |
| 832621 | Preferably excluded from the present invention are one or | W24985, W47319, AA922747 |
| | more polynucleotides comprising a nucleotide sequence | |
| | described by the general formula of a-b, where a is any | |
| | integer between 1 to 1032 of SEQ ID NO: 324, b is an | |
| | integer of 15 to 1046, where both a and b correspond to the | |
| | positions of nucleotide residues shown in SEQ ID NO: 324, | |
| | and where b is greater than or equal to a + 14. | |
| 832622 | Preferably excluded from the present invention are one or | |
| | more polynucleotides comprising a nucleotide sequence | |
| | described by the general formula of a-b, where a is any | |
| | integer between 1 to 660 of SEQ ID NO: 325, b is an | |
| | integer of 15 to 674, where both a and b correspond to the | |
| | positions of nucleotide residues shown in SEQ ID NO: 325, | |
| | and where b is greater than or equal to a + 14. | |
| 835327 | Preferably excluded from the present invention are one or | |
| | more polynucleotides comprising a nucleotide sequence | |
| | described by the general formula of a-b, where a is any | |
| | integer between 1 to 343 of SEQ ID NO: 326, b is an | |
| | integer of 15 to 357, where both a and b correspond to the | |
| | positions of nucleotide residues shown in SEQ ID NO: 326, | |
| | and where b is greater than or equal to a + 14. | |
| 835695 | Preferably excluded from the present invention are one or | |
| | more polynucleotides comprising a nucleotide sequence | |
| | described by the general formula of a-b, where a is any | |
| | integer between 1 to 1565 of SEQ ID NO: 327, b is an | |
| | integer of 15 to 1579, where both a and b correspond to the | |
| | positions of nucleotide residues shown in SEQ ID NO: 327, | |
| | and where b is greater than or equal to a + 14. | |
| 835857 | Preferably excluded from the present invention are one or | |
| | more polynucleotides comprising a nucleotide sequence | |
| | described by the general formula of a-b, where a is any | |
| | integer between 1 to 2258 of SEQ ID NO: 328, b is an | |
| | integer of 15 to 2272, where both a and b correspond to the | |
| | positions of nucleotide residues shown in SEQ ID NO: 328, | |
| | and where b is greater than or equal to a + 14. | |
| 836183 | Preferably excluded from the present invention are one or | |
| | more polynucleotides comprising a nucleotide sequence | |
| | described by the general formula of a-b, where a is any | |
| | integer between 1 to 1306 of SEQ ID NO: 329, b is an | |
| | integer of 15 to 1320, where both a and b correspond to the | |
| | positions of nucleotide residues shown in SEQ ID NO: 329, | |
| | and where b is greater than or equal to a + 14. | |
| 836190 | Preferably excluded from the present invention are one or | |
| | more polynucleotides comprising a nucleotide sequence | |
| | described by the general formula of a-b, where a is any | |
| | integer between 1 to 1846 of SEQ ID NO: 330, b is an | |
| | integer of 15 to 1860, where both a and b correspond to the | |
| | positions of nucleotide residues shown in SEQ ID NO: 330, | |
| | and where b is greater than or equal to a + 14. | |
| 836196 | Preferably excluded from the present invention are one or | T53851, T53923, R63103, R76448, R76703, N35338, N44709, N75001, |
| | more polynucleotides comprising a nucleotide sequence | N98466, N98613, N98769, W05702, W24237, W31023, W30985, W38813, |
| | described by the general formula of a-b, where a is any | W38941, W42920, W42850, W47106, W47230, W56833, W60274, W67278, |
| | integer between 1 to 1562 of SEQ ID NO: 331, b is an | W67414, N89826, AA043314, AA043313, AA046060, AA046186, |
| | integer of 15 to 1576, where both a and b correspond to the | AA102070, AA099937, AA502040, AA507883, AA507901, AA533422, |
| | positions of nucleotide residues shown in SEQ ID NO: 331, | AA847757, AA877285, AA878535, AA887648, AA970407, AA653954, |
| | and where b is greater than or equal to a + 14. | AA291528 |
| 836253 | Preferably excluded from the present invention are one or | |
| | more polynucleotides comprising a nucleotide sequence | |
| | described by the general formula of a-b, where a is any | |
| | integer between 1 to 562 of SEQ ID NO: 332, b is an | |
| | integer of 15 to 576, where both a and b correspond to the | |
| | positions of nucleotide residues shown in SEQ ID NO: 332, | |
| | and where b is greater than or equal to a + 14. | |
| 836372 | Preferably excluded from the present invention are one or | |
| | more polynucleotides comprising a nucleotide sequence | |
| | described by the general formula of a-b, where a is any | |
| | integer between 1 to 1297 of SEQ ID NO: 333, b is an | |
| | integer of 15 to 1311, where both a and b correspond to the | |
| | positions of nucleotide residues shown in SEQ ID NO: 333, | |
| | and where b is greater than or equal to a + 14. | |
| 837077 | Preferably excluded from the present invention are one or | AA604913, AA576835, AA862767, AA902805, AI080476 |
| | more polynucleotides comprising a nucleotide sequence | |
| | described by the general formula of a-b, where a is any | |
| | integer between 1 to 1104 of SEQ ID NO: 334, b is an | |
| | integer of 15 to 1118, where both a and b correspond to the | |
| | positions of nucleotide residues shown in SEQ ID NO: 334, | |
| | and where b is greater than or equal to a + 14. | |
| 837445 | Preferably excluded from the present invention are one or | |
| | more polynucleotides comprising a nucleotide sequence | |
| | described by the general formula of a-b, where a is any | |
| | integer between 1 to 2252 of SEQ ID NO: 335, b is an | |
| | integer of 15 to 2266, where both a and b correspond to the | |
| | positions of nucleotide residues shown in SEQ ID NO: 335, | |
| | and where b is greater than or equal to a + 14. | |
| 837620 | Preferably excluded from the present invention are one or | |
| | more polynucleotides comprising a nucleotide sequence | |
| | described by the general formula of a-b, where a is any | |
| | integer between 1 to 1118 of SEQ ID NO: 336, b is an | |
| | integer of 15 to 1132, where both a and b correspond to the | |
| | positions of nucleotide residues shown in SEQ ID NO: 336, | |
| | and where b is greater than or equal to a + 14. | |
| 837981 | Preferably excluded from the present invention are one or | |
| | more polynucleotides comprising a nucleotide sequence | |
| | described by the general formula of a-b, where a is any | |
| | integer between 1 to 2215 of SEQ ID NO: 337, b is an | |
| | integer of 15 to 2229, where both a and b correspond to the | |
| | positions of nucleotide residues shown in SEQ ID NO: 337, | |
| | and where b is greater than or equal to a + 14. | |
| 837995 | Preferably excluded from the present invention are one or | T51581, T68704, T68747, T68770, T68795, T68814, T73080, T73178, |
| | more polynucleotides comprising a nucleotide sequence | T73508, T83922, T87588, T78456, T78483, T78523, T78568, T79931, |
| | described by the general formula of a-b, where a is any | T83750, R16916, R16973, R73535, R73536, R95125, R95126, R99128, |
| | integer between 1 to 3714 of SEQ ID NO: 338, his an | H48427, H65045, H65046, H65601, H72506, H72904, H73672, H73416, |
| | integer of 15 to 3728, where both a and b correspond to the | H75352, H79656, N55345, N69659, N77351, N94268, N94637, W19274, |
| | positions of nucleotide residues shown in SEQ ID NO: 338, | W23857, W24361, W42977, W48819, W68303, W68486, AA037188, |
| | and where b is greater than or equal to a + 14. | AA044094, AA044284, AA055252, AA055253, AA186602, AA188281, |
| | | AA177045, AA229943, AA514508, AA557392, AA565513, H80617, |
| | | AA588181, AA635650, AA580469, AA687441, AA687497, AA834363, |
| | | AA878670, AA906758, AA934579, AA948660, AA995311, C06397, |
| | | AA284956, AA285113, AA292550 |
| 838001 | Preferably excluded from the present invention are one or | |
| | more polynucleotides comprising a nucleotide sequence | |
| | described by the general formula of a-b, where a is any | |
| | integer between 1 to 2660 of SEQ ID NO: 339, b is an | |
| | integer of 15 to 2674, where both a and b correspond to the | |
| | positions of nucleotide residues shown in SEQ ID NO: 339, | |
| | and where b is greater than or equal to a + 14. | |
| 838237 | Preferably excluded from the present invention are one or | |
| | more polynucleotides comprising a nucleotide sequence | |
| | described by the general formula of a-b, where a is any | |
| | integer between 1 to 1443 of SEQ ID NO: 340, b is an | |
| | integer of 15 to 1457, where both a and b correspond to the | |
| | positions of nucleotide residues shown in SEQ ID NO: 340, | |
| | and where b is greater than or equal to a + 14. | |
| 838700 | Preferably excluded from the present invention are one or | |
| | more polynucleotides comprising a nucleotide sequence | |
| | described by the general formula of a-b, where a is any | |
| | integer between 1 to 3385 of SEQ ID NO: 341, b is an | |
| | integer of 15 to 3399, where both a and b correspond to the | |
| | positions of nucleotide residues shown in SEQ ID NO: 341, | |
| | and where b is greater than or equal to a + 14. | |
| 838805 | Preferably excluded from the present invention are one or | |
| | more polynucleotides comprising a nucleotide sequence | |
| | described by the general formula of a-b, where a is any | |
| | integer between 1 to 1915 of SEQ ID NO: 342, b is an | |
| | integer of 15 to 1929, where both a and b correspond to the | |
| | positions of nucleotide residues shown in SEQ ID NO: 342, | |
| | and where b is greater than or equal to a + 14. | |
| 839096 | Preferably excluded from the present invention are one or | |
| | more polynucleotides comprising a nucleotide sequence | |
| | described by the general formula of a-b, where a is any | |
| | integer between 1 to 1547 of SEQ ID NO: 343, b is an | |
| | integer of 15 to 1561, where both a and b correspond to the | |
| | positions of nucleotide residues shown in SEQ ID NO: 343, | |
| | and where b is greater than or equal to a + 14. | |
| 839185 | Preferably excluded from the present invention are one or | |
| | more polynucleotides comprising a nucleotide sequence | |
| | described by the general formula of a-b, where a is any | |
| | integer between 1 to 2968 of SEQ ID NO: 344, b is an | |
| | integer of 15 to 2982, where both a and b correspond to the | |
| | positions of nucleotide residues shown in SEQ ID NO: 344, | |
| | and where b is greater than or equal to a + 14. | |
| 839588 | Preferably excluded from the present invention are one or | |
| | more polynucleotides comprising a nucleotide sequence | |
| | described by the general formula of a-b, where a is any | |
| | integer between 1 to 1640 of SEQ ID NO: 345, b is an | |
| | integer of 15 to 1654, where both a and b correspond to the | |
| | positions of nucleotide residues shown in SEQ ID NO: 345, | |
| | and where b is greater than or equal to a + 14. | |
| 839589 | Preferably excluded from the present invention are one or | |
| | more polynucleotides comprising a nucleotide sequence | |
| | described by the general formula of a-b, where a is any | |
| | integer between 1 to 484 of SEQ ID NO: 346, b is an | |
| | integer of 15 to 498, where both a and b correspond to the | |
| | positions of nucleotide residues shown in SEQ ID NO: 346, | |
| | and where b is greater than or equal to a + 14. | |
| 839733 | Preferably excluded from the present invention are one or | T49124, T49125, T87606, T80183, R17716, R25789, R37588, R41786, |
| | more polynucleotides comprising a nucleotide sequence | R46788, R41786, R46788, R86012, N27045, N27365, N31477, N75044, |
| | described by the general formula of a-b, where a is any | N80842, N92937, N99972, W05771, AA007622, AA007661, AA035367, |
| | integer between 1 to 3162 of SEQ ID NO: 347, b is an | AA135176, AA135350, AA458470, AA505865, AA506506, AA526375, |
| | integer of 15 to 3176, where both a and b correspond to the | AA613311, AA613813, AA636046, AA639686, AA569896, AA687824, |
| | positions of nucleotide residues shown in SEQ ID NO: 347, | AA740795, AA828494, AA830137, AA836424, AA902192, AA907444, |
| | and where b is greater than or equal to a + 14. | AA910103, AA916663, AA961769, AA987257, AA995286, C02440, C03271, |
| | | C04496, AA400614, AA401259, AA401972, AA402117, AA404233, |
| | | AA442982, AA453509, AA453510, AA454684, AA456333, AA845142, |
| | | AA854089, AA813552, AA860919, AI024368, AI078067, D30835, D31579 |
| 839874 | Preferably excluded from the present invention are one or | H826, H19387, AA082620 |
| | more polynucleotides comprising a nucleotide sequence | |
| | described by the general formula of a-b, where a is any | |
| | integer between 1 to 1113 of SEQ ID NO: 348, b is an | |
| | integer of 15 to 1127, where both a and b correspond to the | |
| | positions of nucleotide residues shown in SEQ ID NO: 348, | |
| | and where b is greater than or equal to a + 14. | |
| 840017 | Preferably excluded from the present invention are one or | |
| | more polynucleotides comprising a nucleotide sequence | |
| | described by the general formula of a-b, where a is any | |
| | integer between 1 to 2121 of SEQ ID NO: 349, b is an | |
| | integer of 15 to 2135, where both a and b correspond to the | |
| | positions of nucleotide residues shown in SEQ ID NO: 349, | |
| | and where b is greater than or equal to a + 14. | |
| 840124 | Preferably excluded from the present invention are one or | |
| | more polynucleotides comprising a nucleotide sequence | |
| | described by the general formula of a-b, where a is any | |
| | integer between 1 to 1564 of SEQ ID NO: 350, b is an | |
| | integer of 15 to 1578, where both a and b correspond to the | |
| | positions of nucleotide residues shown in SEQ ID NO: 350, | |
| | and where b is greater than or equal to a + 14. | |
| 840222 | Preferably excluded from the present invention are one or | R84486, R84529, R88248, Z43097 |
| | more polynucleotides comprising a nucleotide sequence | |
| | described by the general formula of a-b, where a is any | |
| | integer between 1 to 960 of SEQ ID NO: 351, b is an | |
| | integer of 15 to 974, where both a and b correspond to the | |
| | positions of nucleotide residues shown in SEQ ID NO: 351, | |
| | and where b is greater than or equal to a + 14. | |
| 840617 | Preferably excluded from the present invention are one or | |
| | more polynucleotides comprising a nucleotide sequence | |
| | described by the general formula of a-b, where a is any | |
| | integer between 1 to 2587 of SEQ ID NO: 352, b is an | |
| | integer of 15 to 2601, where both a and b correspond to the | |
| | positions of nucleotide residues shown in SEQ ID NO: 352, | |
| | and where b is greater than or equal to a + 14. | |
| 840641 | Preferably excluded from the present invention are one or | H50311, N31637, N38837, N57092, W25229, W35251, W58039, W58123, |
| | more polynucleotides comprising a nucleotide sequence | W72521, W76080, N89999, AA256075, AA256114, AA426416, AA279475, |
| | described by the general formula of a-b, where a is any | AA287965, AA286961, AA286962, AA405003, AA521338, AA588308, |
| | integer between 1 to 907 of SEQ ID NO: 353, b is an | AA729660, AA732508, AA736855, AA760789, AA765636, AA766365, |
| | integer of 15 to 921, where both a and b correspond to the | AA805546, AA825927, AA911323, AA917840, AA918945, AA922719, |
| | positions of nucleotide residues shown in SEQ ID NO: 353, | AA939023, AA969474, AA976724, N95393, AA453687, AA482391, |
| | and where b is greater than or equal to a + 14. | AA447756, AA706719, AA709036, AA719892, AI089099, D20399 |
| 840792 | Preferably excluded from the present invention are one or | R23893, R23892, R32223, R81610, H00321, N30960, N66394, W40278, |
| | more polynucleotides comprising a nucleotide sequence | W40275, W45359, W56625, W56539, AA025789, AA025949, AA126511, |
| | described by the general formula of a-b, where a is any | AA126636, AA131184, AA131120, AA131260, AA135445, AA164894, |
| | integer between 1 to 1297 of SEQ ID NO: 354, b is an | AA164893, AA181943, AA262234, AA460727, AA460899, AA614654, |
| | integer of 15 to 1311, where both a and b correspond to the | AA576166, AA577101, AA577111, AA814470, AA962227, AA996044, |
| | positions of nucleotide residues shown in SEQ ID NO: 354, | C00083, C18672, AA644060, AA635144, AA725839, AA960853, AA992056, |
| | and where b is greater than or equal to a + 14. | AI003313, AI014315, AI024320, AI122746, T24622 |
| 840915 | Preferably excluded from the present invention are one or | |
| | more polynucleotides comprising a nucleotide sequence | |
| | described by the general formula of a-b, where a is any | |
| | integer between 1 to 2239 of SEQ ID NO: 355, b is an | |
| | integer of 15 to 2253, where both a and b correspond to the | |
| | positions of nucleotide residues shown in SEQ ID NO: 355, | |
| | and where b is greater than or equal to a + 14. | |
| 841059 | Preferably excluded from the present invention are one or | |
| | more polynucleotides comprising a nucleotide sequence | |
| | described by the general formula of a-b, where a is any | |
| | integer between 1 to 1221 of SEQ ID NO: 356, b is an | |
| | integer of 15 to 1235, where both a and b correspond to the | |
| | positions of nucleotide residues shown in SEQ ID NO: 356, | |
| | and where b is greater than or equal to a + 14. | |
| 841325 | Preferably excluded from the present invention are one or | R28417, R28429, AA279887, AA481504 |
| | more polynucleotides comprising a nucleotide sequence | |
| | described by the general formula of a-b, where a is any | |
| | integer between 1 to 1394 of SEQ ID NO: 357, b is an | |
| | integer of 15 to 1408, where both a and b correspond to the | |
| | positions of nucleotide residues shown in SEQ ID NO: 357. | |
| | and where b is greater than or equal to a + 14. | |
| 841713 | Preferably excluded from the present invention are one or | |
| | more polynucleotides comprising a nucleotide sequence | |
| | described by the general formula of a-b, where a is any | |
| | integer between 1 to 858 of SEQ ID NO: 358, b is an | |
| | integer of 15 to 872, where both a and b correspond to the | |
| | positions of nucleotide residues shown in SEQ ID NO: 358, | |
| | and where b is greater than or equal to a + 14. | |
| 842324 | Preferably excluded from the present invention are one or | |
| | more polynucleotides comprising a nucleotide sequence | |
| | described by the general formula of a-b, where a is any | |
| | integer between 1 to 1730 of SEQ ID NO: 359, b is an | |
| | integer of 15 to 1744, where both a and b correspond to the | |
| | positions of nucleotide residues shown in SEQ ID NO: 359, | |
| | and where b is greater than or equal to a + 14. | |
| 842386 | Preferably excluded from the present invention are one or | |
| | more polynucleotides comprising a nucleotide sequence | |
| | described by the general formula of a-b, where a is any | |
| | integer between 1 to 659 of SEQ ID NO: 360, b is an | |
| | integer of 15 to 673, where both a and b correspond to the | |
| | positions of nucleotide residues shown in SEQ ID NO: 360, | |
| | and where b is greater than or equal to a + 14. | |
| 842454 | Preferably excluded from the present invention are one or | |
| | more polynucleotides comprising a nucleotide sequence | |
| | described by the general formula of a-b, where a is any | |
| | integer between 1 to 1310 of SEQ ID NO: 361, b is an | |
| | integer of 15 to 1324, where both a and b correspond to the | |
| | positions of nucleotide residues shown in SEQ ID NO: 361, | |
| | and where b is greater than or equal to a + 14. | |
| 842768 | Preferably excluded from the present invention are one or | |
| | more polynucleotides comprising a nucleotide sequence | |
| | described by the general formula of a-b, where a is any | |
| | integer between 1 to 664 of SEQ ID NO: 362, b is an | |
| | integer of 15 to 678, where both a and b correspond to the | |
| | positions of nucleotide residues shown in SEQ ID NO: 362, | |
| | and where b is greater than or equal to a + 14. | |
| 842999 | Preferably excluded from the present invention are one or | |
| | more polynucleotides comprising a nucleotide sequence | |
| | described by the general formula of a-b, where a is any | |
| | integer between 1 to 5222 of SEQ ID NO: 363, b is an | |
| | integer of 15 to 5236, where both a and b correspond to the | |
| | positions of nucleotide residues shown in SEQ ID NO: 363, | |
| | and where b is greater than or equal to a + 14. | |
| 843830 | Preferably excluded from the present invention are one or | |
| | more polynucleotides comprising a nucleotide sequence | |
| | described by the general formula of a-b, where a is any | |
| | integer between 1 to 1006 of SEQ ID NO: 364, b is an | |
| | integer of 15 to 1020, where both a and b correspond to the | |
| | positions of nucleotide residues shown in SEQ ID NO: 364, | |
| | and where b is greater than or equal to a + 14. | |
| 844723 | Preferably excluded from the present invention are one or | |
| | more polynucleotides comprising a nucleotide sequence | |
| | described by the general formula of a-b, where a is any | |
| | integer between 1 to 2194 of SEQ ID NO: 365, b is an | |
| | integer of 15 to 2208, where both a and b correspond to the | |
| | positions of nucleotide residues shown in SEQ ID NO: 365, | |
| | and where b is greater than or equal to a + 14. | |
| 844868 | Preferably excluded from the present invention are one or | |
| | more polynucleotides comprising a nucleotide sequence | |
| | described by the general formula of a-b, where a is any | |
| | integer between 1 to 2741 of SEQ ID NO: 366, b is an | |
| | integer of 15 to 2755, where both a and b correspond to the | |
| | positions of nucleotide residues shown in SEQ ID NO: 366, | |
| | and where b is greater than or equal to a + 14. | |
| 845258 | Preferably excluded from the present invention are one or | R24215, R24216, R66047, R66048, H02011, H12618, H12668, H90748, |
| | more polynucleotides comprising a nucleotide sequence | H90799, N69833, N93931, N98972, W40431, W90007, AA024872, |
| | described by the general formula of a-b, where a is any | AA115390, AA133417, AA194946, AA195087, AA195556, AA195715, |
| | integer between 1 to 1950 of SEQ ID NO: 367, b is an | AA195752, AA425375, AA425467, AA903701, AI078393, Z44587, |
| | integer of 15 to 1964, where both a and b correspond to the | AA700297, AA702853 |
| | positions of nucleotide residues shown in SEQ ID NO: 367, | |
| | and where b is greater than or equal to a + 14. | |
| 845373 | Preferably excluded from the present invention are one or | |
| | more polynucleotides comprising a nucleotide sequence | |
| | described by the general formula of a-b, where a is any | |
| | integer between 1 to 3033 of SEQ ID NO: 368, b is an | |
| | integer of 15 to 3047, where both a and b correspond to the | |
| | positions of nucleotide residues shown in SEQ ID NO: 368, | |
| | and where b is greater than or equal to a + 14. | |
| 845412 | Preferably excluded from the present invention are one or | |
| | more polynucleotides comprising a nucleotide sequence | |
| | described by the general formula of a-b, where a is any | |
| | integer between 1 to 2397 of SEQ ID NO: 369, b is an | |
| | integer of 15 to 2411, where both a and b correspond to the | |
| | positions of nucleotide residues shown in SEQ ID NO: 369, | |
| | and where b is greater than or equal to a + 14. | |

[0061] Polynucleotide and Polypeptide Variants

[0062] The present invention is directed to variants of the polynucleotide sequence disclosed in SEQ ID NO:X or the complementary strand thereto, and/or the cDNA sequence contained in a cDNA clone contained in the deposit.

[0063] The present invention also encompasses variants of the pancreas and pancreatic cancer polypeptide sequence disclosed in SEQ ID NO:Y, a polypeptide sequence encoded by the polynucleotide sequence in SEQ ID NO:X, and/or a polypeptide sequence encoded by the cDNA in the related cDNA clone contained in the deposit.

[0064] “Variant” refers to a polynucleotide or polypeptide differing from the polynucleotide or polypeptide of the present invention, but retaining essential properties thereof. Generally, variants are overall closely similar, and, in many regions, identical to the polynucleotide or polypeptide of the present invention.

[0065] The present invention is also directed to nucleic acid molecules which comprise, or alternatively consist of, a nucleotide sequence which is at least 80%, 85%, 90%, 95%, 96%, 97%, 98%, 99% or 100%, identical to, for example, the nucleotide coding sequence in SEQ ID NO:X or the complementary strand thereto, the nucleotide coding sequence of the related cDNA contained in a deposited library or the complementary strand thereto, a nucleotide sequence encoding the polypeptide of SEQ ID NO:Y, a nucleotide sequence encoding a polypeptide sequence encoded by the nucleotide sequence in SEQ ID NO:X, a nucleotide sequence encoding the polypeptide encoded by the cDNA in the related cDNA contained in a deposited library, and/or polynucleotide fragments of any of these nucleic acid molecules (e.g., those fragments described herein). Polypeptides encoded by these nucleic acid molecules are also encompassed by the invention. In another embodiment, the invention encompasses nucleic acid molecules which comprise or alternatively consist of, a polynucleotide which hybridizes under stringent hybridization conditions, or alternatively, under low stringency conditions, to the nucleotide coding sequence in SEQ ID NO:X, the nucleotide coding sequence of the related cDNA clone contained in a deposited library, a nucleotide sequence encoding the polypeptide of SEQ ID NO:Y, a nucleotide sequence encoding a polypeptide sequence encoded by the nucleotide sequence in SEQ ID NO:X, a nucleotide sequence encoding the polypeptide encoded by the cDNA in the related cDNA clone contained in a deposited library, and/or polynucleotide fragments of any of these nucleic acid molecules (e.g., those fragments described herein). Polynucleotides which hybridize to the complement of these nucleic acid molecules under stringent hybridization conditions or alternatively, under lower stringency conditions, are also encompassed by the invention, as are polypeptides encoded by these polynucleotides.

[0066] The present invention is also directed to polypeptides which comprise, or alternatively consist of, an amino acid sequence which is at least 80%, 85%, 90%, 95%, 96%, 97%, 98%, 99% or 100% identical to, for example, the polypeptide sequence shown in SEQ ID NO:Y, a polypeptide sequence encoded by the nucleotide sequence in SEQ ID NO:X, a polypeptide sequence encoded by the cDNA in the related cDNA clone contained in a deposited library, and/or polypeptide fragments of any of these polypeptides (e.g., those fragments described herein). Polynucleotides which hybridize to the complement of the nucleic acid molecules encoding these polypeptides under stringent hybridization conditions, or alternatively, under lower stringency conditions, are also encompassed by the invention, as are polypeptides encoded by these polynucleotides.

[0067] By a nucleic acid having a nucleotide sequence at least, for example, 95% “identical” to a reference nucleotide sequence of the present invention, it is intended that the nucleotide sequence of the nucleic acid is identical to the reference sequence except that the nucleotide sequence may include up to five point mutations per each 100 nucleotides of the reference nucleotide sequence encoding the polypeptide. In other words, to obtain a nucleic acid having a nucleotide sequence at least 95% identical to a reference nucleotide sequence, up to 5% of the nucleotides in the reference sequence may be deleted or substituted with another nucleotide, or a number of nucleotides up to 5% of the total nucleotides in the reference sequence may be inserted into the reference sequence. The query sequence may be, for example, an entire sequence referred to in Table 1, an ORF (open reading frame), or any fragment specified as described herein.

[0068] As a practical matter, whether any particular nucleic acid molecule or polypeptide is at least 80%, 85%, 90%, 95%, 96%, 97%, 98% or 99% identical to a nucleotide sequence of the present invention can be determined conventionally using known computer programs. A preferred method for determining the best overall match between a query sequence (a sequence of the present invention) and a subject sequence, also referred to as a global sequence alignment, can be determined using the FASTDB computer program based on the algorithm of Brutlag et al. (Comp. App. Biosci. 6:237-245 (1990)). In a sequence alignment the query and subject sequences are both DNA sequences. An RNA sequence can be compared by converting U's to T's. The result of said global sequence alignment is in percent identity. Preferred parameters used in a FASTDB alignment of DNA sequences to calculate percent identity are: Matrix=Unitary, k-tuple=4, Mismatch Penalty=1, Joining Penalty=30, Randomization Group Length=0, Cutoff Score=1, Gap Penalty=5, Gap Size Penalty 0.05, Window Size=500 or the length of the subject nucleotide sequence, whichever is shorter.

[0069] If the subject sequence is shorter than the query sequence because of 5′ or 3′ deletions, not because of internal deletions, a manual correction must be made to the results. This is because the FASTDB program does not account for 5′ and 3′ truncations of the subject sequence when calculating percent identity. For subject sequences truncated at the 5′ or 3′ ends, relative to the query sequence, the percent identity is corrected by calculating the number of bases of the query sequence that are 5′ and 3′ of the subject sequence, which are not matched/aligned, as a percent of the total bases of the query sequence. Whether a nucleotide is matched/aligned is determined by results of the FASTDB sequence alignment. This percentage is then subtracted from the percent identity, calculated by the above FASTDB program using the specified parameters, to arrive at a final percent identity score. This corrected score is what is used for the purposes of the present invention. Only bases outside the 5′ and 3′ bases of the subject sequence, as displayed by the FASTDB alignment, which are not matched/aligned with the query sequence, are calculated for the purposes of manually adjusting the percent identity score.

[0070] For example, a 90 base subject sequence is aligned to a 100 base query sequence to determine percent identity. The deletions occur at the 5′ end of the subject sequence and therefore, the FASTDB alignment does not show a matched/alignment of the first 10 bases at 5′ end. The 10 unpaired bases represent 10% of the sequence (number of bases at the 5′ and 3′ ends not matched/total number of bases in the query sequence) so 10% is subtracted from the percent identity score calculated by the FASTDB program. If the remaining 90 bases were perfectly matched the final percent identity would be 90%. In another example, a 90 base subject sequence is compared with a 100 base query sequence. This time the deletions are internal deletions so that there are no bases on the 5′ or 3′ of the subject sequence which are not matched/aligned with the query. In this case the percent identity calculated by FASTDB is not manually corrected. Once again, only bases 5′ and 3′ of the subject sequence which are not matched/aligned with the query sequence are manually corrected for. No other manual corrections are to made for the purposes of the present invention.

[0071] By a polypeptide having an amino acid sequence at least, for example, 95% “identical” to a query amino acid sequence of the present invention, it is intended that the amino acid sequence of the subject polypeptide is identical to the query sequence except that the subject polypeptide sequence may include up to five amino acid alterations per each 100 amino acids of the query amino acid sequence. In other words, to obtain a polypeptide having an amino acid sequence at least 95% identical to a query amino acid sequence, up to 5% of the amino acid residues in the subject sequence may be inserted, deleted, (indels) or substituted with another amino acid. These alterations of the reference sequence may occur at the amino or carboxy terminal positions of the reference amino acid sequence or anywhere between those terminal positions, interspersed either individually among residues in the reference sequence or in one or more contiguous groups within the reference sequence.

[0072] As a practical matter, whether any particular polypeptide is at least 80%, 85%, 90%, 95%, 96%, 97%, 98% or 99% identical to, for instance, the amino acid sequence in SEQ ID NO:Y or a fragment thereof, the amino acid sequence encoded by the nucleotide sequence in SEQ ID NO:X or a fragment thereof, or the amino acid sequence encoded by the cDNA in the related cDNA clone contained in a deposited library, or a fragment thereof, can be determined conventionally using known computer programs. A preferred method for determining the best overall match between a query sequence (a sequence of the present invention) and a subject sequence, also referred to as a global sequence alignment, can be determined using the FASTDB computer program based on the algorithm of Brutlag et al. (Comp. App. Biosci.6:237-245(1990)). In a sequence alignment the query and subject sequences are either both nucleotide sequences or both amino acid sequences. The result of said global sequence alignment is in percent identity. Preferred parameters used in a FASTDB amino acid alignment are: Matrix=PAM 0, k-tuple=2, Mismatch Penalty=1, Joining Penalty=20, Randomization Group Length=0, Cutoff Score=1, Window Size=sequence length, Gap Penalty=5, Gap Size Penalty=0.05, Window Size=500 or the length of the subject amino acid sequence, whichever is shorter.

[0073] If the subject sequence is shorter than the query sequence due to N- or C-terminal deletions, not because of internal deletions, a manual correction must be made to the results. This is because the FASTDB program does not account for N- and C-terminal truncations of the subject sequence when calculating global percent identity. For subject sequences truncated at the N- and C-termini, relative to the query sequence, the percent identity is corrected by calculating the number of residues of the query sequence that are N- and C-terminal of the subject sequence, which are not matched/aligned with a corresponding subject residue, as a percent of the total bases of the query sequence. Whether a residue is matched/aligned is determined by results of the FASTDB sequence alignment. This percentage is then subtracted from the percent identity, calculated by the above FASTDB program using the specified parameters, to arrive at a final percent identity score. This final percent identity score is what is used for the purposes of the present invention. Only residues to the N- and C-termini of the subject sequence, which are not matched/aligned with the query sequence, are considered for the purposes of manually adjusting the percent identity score. That is, only query residue positions outside the farthest N- and C-terminal residues of the subject sequence.

[0074] For example, a 90 amino acid residue subject sequence is aligned with a 100 residue query sequence to determine percent identity. The deletion occurs at the N-terminus of the subject sequence and therefore, the FASTDB alignment does not show a matching/alignment of the first 10 residues at the N-terminus. The 10 unpaired residues represent 10% of the sequence (number of residues at the N- and C-termini not matched/total number of residues in the query sequence) so 10% is subtracted from the percent identity score calculated by the FASTDB program. If the remaining 90 residues were perfectly matched the final percent identity would be 90%. In another example, a 90 residue subject sequence is compared with a 100 residue query sequence. This time the deletions are internal deletions so there are no residues at the N- or C-termini of the subject sequence which are not matched/aligned with the query. In this case the percent identity calculated by FASTDB is not manually corrected. Once again, only residue positions outside the N- and C-terminal ends of the subject sequence, as displayed in the FASTDB alignment, which are not matched/aligned with the query sequence are manually corrected for. No other manual corrections are to made for the purposes of the present invention.

[0075] The variants may contain alterations in the coding regions, non-coding regions, or both. Especially preferred are polynucleotide variants containing alterations which produce silent substitutions, additions, or deletions, but do not alter the properties or activities of the encoded polypeptide. Nucleotide variants produced by silent substitutions due to the degeneracy of the genetic code are preferred. Moreover, variants in which less than 50, less than 40, less than 30, less than 20, less than 10, or 5-50, 5-25, 5-10, 1-5, or 1-2 amino acids are substituted, deleted, or added in any combination are also preferred. Polynucleotide variants can be produced for a variety of reasons, e.g., to optimize codon expression for a particular host (change codons in the human mRNA to those preferred by a bacterial host such as E. coli).

[0076] Naturally occurring variants are called “allelic variants,” and refer to one of several alternate forms of a gene occupying a given locus on a chromosome of an organism. (Genes II, Lewin, B., ed., John Wiley & Sons, New York (1985).) These allelic variants can vary at either the polynucleotide and/or polypeptide level and are included in the present invention. Alternatively, non-naturally occurring variants may be produced by mutagenesis techniques or by direct synthesis.

[0077] Using known methods of protein engineering and recombinant DNA technology, variants may be generated to improve or alter the characteristics of the polypeptides of the present invention. For instance, as discussed herein, one or more amino acids can be deleted from the N-terminus or C-terminus of the polypeptide of the present invention without substantial loss of biological function. The authors of Ron et al., J. Biol. Chem. 268: 2984-2988 (1993), reported variant KGF proteins having heparin binding activity even after deleting 3, 8, or 27 amino-terminal amino acid residues. Similarly, Interferon gamma exhibited up to ten times higher activity after deleting 8-10 amino acid residues from the carboxy terminus of this protein. (Dobeli et al., J. Biotechnology 7:199-216 (1988).)

[0078] Moreover, ample evidence demonstrates that variants often retain a biological activity similar to that of the naturally occurring protein. For example, Gayle and coworkers (J. Biol. Chem 268:22105-22111 (1993)) conducted extensive mutational analysis of human cytokine IL-1a. They used random mutagenesis to generate over 3,500 individual IL-1a mutants that averaged 2.5 amino acid changes per variant over the entire length of the molecule. Multiple mutations were examined at every possible amino acid position. The investigators found that “[m]ost of the molecule could be altered with little effect on either [binding or biological activity].” (See, Abstract.) In fact, only 23 unique amino acid sequences, out of more than 3,500 nucleotide sequences examined, produced a protein that significantly differed in activity from wild-type.

[0079] Furthermore, as discussed herein, even if deleting one or more amino acids from the N-terminus or C-terminus of a polypeptide results in modification or loss of one or more biological functions, other biological activities may still be retained. For example, the ability of a deletion variant to induce and/or to bind antibodies which recognize the secreted form will likely be retained when less than the majority of the residues of the secreted form are removed from the N-terminus or C-terminus. Whether a particular polypeptide lacking N- or C-terminal residues of a protein retains such immunogenic activities can readily be determined by routine methods described herein and otherwise known in the art.

[0080] Thus, the invention further includes polypeptide variants which show a functional activity (e.g., biological activity) of the polypeptide of the invention of which they are a variant. Such variants include deletions, insertions, inversions, repeats, and substitutions selected according to general rules known in the art so as have little effect on activity.

[0081] The present application is directed to nucleic acid molecules at least 80%, 85%, 90%, 95%, 96%, 97%, 98%, 99% or 100% identical to the nucleic acid sequences disclosed herein or fragments thereof, (e.g., including but not limited to fragments encoding a polypeptide having the amino acid sequence of an N and/or C terminal deletion), irrespective of whether they encode a polypeptide having functional activity. This is because even where a particular nucleic acid molecule does not encode a polypeptide having functional activity, one of skill in the art would still know how to use the nucleic acid molecule, for instance, as a hybridization probe or a polymerase chain reaction (PCR) primer. Uses of the nucleic acid molecules of the present invention that do not encode a polypeptide having functional activity include, inter alia, (1) isolating a gene or allelic or splice variants thereof in a cDNA library; (2) in situ hybridization (e.g., “FISH”) to metaphase chromosomal spreads to provide precise chromosomal location of the gene, as described in Verma et al., Human Chromosomes: A Manual of Basic Techniques, Pergamon Press, New York (1988); and (3) Northern Blot analysis for detecting mRNA expression in specific tissues.

[0082] Preferred, however, are nucleic acid molecules having sequences at least 80%, 85%, 90%, 95%, 96%, 97%, 98%, 99% or 100% identical to the nucleic acid sequences disclosed herein, which do, in fact, encode a polypeptide having a functional activity of a polypeptide of the invention.

[0083] Of course, due to the degeneracy of the genetic code, one of ordinary skill in the art will immediately recognize that a large number of the nucleic acid molecules having a sequence at least 80%, 85%, 90%, 95%, 96%, 97%, 98%, 99%, or 100% identical to, for example, the nucleic acid sequence of the cDNA in the related cDNA clone contained in a deposited library, the nucleic acid sequence referred to in Table 1 (SEQ ID NO:X), or fragments thereof, will encode polypeptides “having functional activity.” In fact, since degenerate variants of any of these nucleotide sequences all encode the same polypeptide, in many instances, this will be clear to the skilled artisan even without performing the above described comparison assay. It will be further recognized in the art that, for such nucleic acid molecules that are not degenerate variants, a reasonable number will also encode a polypeptide having functional activity. This is because the skilled artisan is fully aware of amino acid substitutions that are either less likely or not likely to significantly effect protein function (e.g., replacing one aliphatic amino acid with a second aliphatic amino acid), as further described below.

[0084] For example, guidance concerning how to make phenotypically silent amino acid substitutions is provided in Bowie et al., “Deciphering the Message in Protein Sequences: Tolerance to Amino Acid Substitutions,” Science 247:1306-1310 (1990), wherein the authors indicate that there are two main strategies for studying the tolerance of an amino acid sequence to change.

[0085] The first strategy exploits the tolerance of amino acid substitutions by natural selection during the process of evolution. By comparing amino acid sequences in different species, conserved amino acids can be identified. These conserved amino acids are likely important for protein function. In contrast, the amino acid positions where substitutions have been tolerated by natural selection indicates that these positions are not critical for protein function. Thus, positions tolerating amino acid substitution could be modified while still maintaining biological activity of the protein.

[0086] The second strategy uses genetic engineering to introduce amino acid changes at specific positions of a cloned gene to identify regions critical for protein function. For example, site directed mutagenesis or alanine-scanning mutagenesis (introduction of single alanine mutations at every residue in the molecule) can be used. (Cunningham and Wells, Science 244:1081-1085 (1989).) The resulting mutant molecules can then be tested for biological activity.

[0087] As the authors state, these two strategies have revealed that proteins are surprisingly tolerant of amino acid substitutions. The authors further indicate which amino acid changes are likely to be permissive at certain amino acid positions in the protein. For example, most buried (within the tertiary structure of the protein) amino acid residues require nonpolar side chains, whereas few features of surface side chains are generally conserved. Moreover, tolerated conservative amino acid substitutions involve replacement of the aliphatic or hydrophobic amino acids Ala, Val, Leu and Ile; replacement of the hydroxyl residues Ser and Thr; replacement of the acidic residues Asp and Glu; replacement of the amide residues Asn and Gln, replacement of the basic residues Lys, Arg, and His; replacement of the aromatic residues Phe, Tyr, and Trp, and replacement of the small-sized amino acids Ala, Ser, Thr, Met, and Gly. Besides conservative amino acid substitution, variants of the present invention include (i) substitutions with one or more of the non-conserved amino acid residues, where the substituted amino acid residues may or may not be one encoded by the genetic code, or (ii) substitution with one or more of amino acid residues having a substituent group, or (iii) fusion of the mature polypeptide with another compound, such as a compound to increase the stability and/or solubility of the polypeptide (for example, polyethylene glycol), or (iv) fusion of the polypeptide with additional amino acids, such as, for example, an IgG Fc fusion region peptide, or leader or secretory sequence, or a sequence facilitating purification. Such variant polypeptides are deemed to be within the scope of those skilled in the art from the teachings herein.

[0088] For example, polypeptide variants containing amino acid substitutions of charged amino acids with other charged or neutral amino acids may produce proteins with improved characteristics, such as less aggregation. Aggregation of pharmaceutical formulations both reduces activity and increases clearance due to the aggregate's immunogenic activity. (Pinckard et al., Clin. Exp. Immunol. 2:331-340 (1967); Robbins et al., Diabetes 36: 838-845 (1987); Cleland et al., Crit. Rev. Therapeutic Drug Carrier Systems 10:307-377 (1993).)

[0089] A further embodiment of the invention relates to a polypeptide which comprises the amino acid sequence of a polypeptide having an amino acid sequence which contains at least one amino acid substitution, but not more than 50 amino acid substitutions, even more preferably, not more than 40 amino acid substitutions, still more preferably, not more than 30 amino acid substitutions, and still even more preferably, not more than 20 amino acid substitutions. Of course it is highly preferable for a polypeptide to have an amino acid sequence which comprises the amino acid sequence of a polypeptide of SEQ ID NO:Y, an amino acid sequence encoded by SEQ ID NO:X, and/or the amino acid sequence encoded by the cDNA in the related cDNA clone contained in a deposited library which contains, in order of ever-increasing preference, at least one, but not more than 10, 9, 8, 7, 6, 5, 4, 3, 2 or 1 amino acid substitutions. In specific embodiments, the number of additions, substitutions, and/or deletions in the amino acid sequence of SEQ ID NO:Y or fragments thereof (e.g., the mature form and/or other fragments described herein), an amino acid sequence encoded by SEQ ID NO:X or fragments thereof, and/or the amino acid sequence encoded by the cDNA in the related cDNA clone contained in a deposited library or fragments thereof, is 1-5, 5-10, 5-25, 5-50, 10-50 or 50-150, conservative amino acid substitutions are preferable.

[0090] Polynucleotide and Polypeptide Fragments

[0091] The present invention is also directed to polynucleotide fragments of the pancreas and pancreatic cancer polynucleotides (nucleic acids) of the invention. In the present invention, a “polynucleotide fragment” refers, for example, to a polynucleotide having a nucleic acid sequence which: is a portion of the cDNA contained in a deposited cDNA clone; or is a portion of a polynucleotide sequence encoding the polypeptide encoded by the cDNA contained in a deposited cDNA clone; or is a portion of the polynucleotide sequence in SEQ ID NO:X or the complementary strand thereto; or is a polynucleotide sequence encoding a portion of the polypeptide of SEQ ID NO:Y; or is a polynucleotide sequence encoding a portion of a polypeptide encoded by SEQ ID NO:X or the complementary strand thereto. The nucleotide fragments of the invention are preferably at least about 15 nt, and more preferably at least about 20 nt, still more preferably at least about 30 nt, and even more preferably, at least about 40 nt, at least about 50 nt, at least about 75 nt, at least about 100 nt, at least about 125 nt or at least about 150 nt in length. A fragment “at least 20 nt in length,” for example, is intended to include 20 or more contiguous bases from, for example, the sequence contained in the cDNA in a related cDNA clone contained in a deposited library, the nucleotide sequence shown in SEQ ID NO:X or the complementary stand thereto. In this context “about” includes the particularly recited value or a value larger or smaller by several (5, 4, 3, 2, or 1) nucleotides. These nucleotide fragments have uses that include, but are not limited to, as diagnostic probes and primers as discussed herein. Of course, larger fragments (e.g., at least 150, 175, 200, 250, 500, 600, 1000, or 2000 nucleotides in length) are also encompassed by the invention.

[0092] Moreover, representative examples of polynucleotide fragments of the invention, include, for example, fragments comprising, or alternatively consisting of, a sequence from about nucleotide number 1-50, 51-100, 101-150, 151-200, 201-250, 251-300, 301-350, 351-400, 401-450, 451-500, 501-550, 551-600, 651-700,701-750, 751-800, 800-850, 851-900, 901-950, 951-1000, 1001-1050, 1051-1100, 1101-1150, 1151-1200, 1201-1250, 1251-1300, 1301-1350, 1351-1400, 1401-1450, 1451-1500, 1501-1550, 1551-1600, 1601-1650, 1651-1700, 1701-1750, 1751-1800, 1801-1850, 1851-1900, 1901-1950, 1951-2000, 2001-2050, 2051-2100, 2101-2150, 2151-2200, 2201-2250, 2251-2300, 2301-2350, 2351-2400, 2401-2450, 2451-2500, 2501-2550, 2551-2600, 2601-2650, 2651-2700, 2701-2750, 2751-2800, 2801-2850, 2851-2900, 2901-2950, 2951-3000, 3001-3050, 3051-3100, 3101-3150, 3151-3200, 3201-3250, 3251-3300, 3301-3350, 3351-3400, 3401-3450, 3451-3500, 3501-3550, and 3551 to the end of SEQ ID NO:X, or the complementary strand thereto. In this context “about” includes the particularly recited range or a range larger or smaller by several (5, 4, 3, 2, or 1) nucleotides, at either terminus or at both termini. Preferably, these fragments encode a polypeptide which has a functional activity (e.g., biological activity) of the polypeptide encoded by the polynucleotide of which the sequence is a portion. More preferably, these fragments can be used as probes or primers as discussed herein. Polynucleotides which hybridize to one or more of these nucleic acid molecules under stringent hybridization conditions or alternatively, under lower stringency conditions, are also encompassed by the invention, as are polypeptides encoded by these polynucleotides or fragments.

[0093] Moreover, representative examples of polynucleotide fragments of the invention, include, for example, fragments comprising, or alternatively consisting of, a sequence from about nucleotide number 1-50, 51-100, 101-150, 151-200, 201-250, 251-300, 301-350, 351-400, 401-450, 451-500, 501-550, 551-600, 651-700,701-750, 751-800, 800-850, 851-900, 901-950, 951-1000, 1001-1050, 1051-1100, 1101-1150, 1151-1200, 1201-1250, 1251-1300, 1301-1350, 1351-1400, 1401-1450, 1451-1500, 1501-1550, 1551-1600, 1601-1650, 1651-1700, 1701-1750, 1751-1800, 1801-1850, 1851-1900, 1901-1950, 1951-2000, 2001-2050, 2051-2100, 2101-2150, 2151-2200, 2201-2250, 2251-2300, 2301-2350, 2351-2400, 2401-2450, 2451-2500, 2501-2550, 2551-2600, 2601-2650, 2651-2700, 2701-2750, 2751-2800, 2801-2850, 2851-2900, 2901-2950, 2951-3000, 3001-3050, 3051-3100, 3101-3150, 3151-3200, 3201-3250, 3251-3300, 3301-3350, 3351-3400, 3401-3450, 3451-3500, 3501-3550, and 3551 to the end of the cDNA nucleotide sequence contained in the deposited cDNA clone, or the complementary strand thereto. In this context “about” includes the particularly recited range, or a range larger or smaller by several (5, 4, 3, 2, or 1) nucleotides, at either terminus or at both termini. Preferably, these fragments encode a polypeptide which has a functional activity (e.g., biological activity) of the polypeptide encoded by the cDNA nucleotide sequence contained in the deposited cDNA clone. More preferably, these fragments can be used as probes or primers as discussed herein. Polynucleotides which hybridize to one or more of these fragments under stringent hybridization conditions or alternatively, under lower stringency conditions, are also encompassed by the invention, as are polypeptides encoded by these polynucleotides or fragments.

[0094] In the present invention, a “polypeptide fragment” refers to an amino acid sequence which is a portion of that contained in SEQ ID NO:Y, a portion of an amino acid sequence encoded by the polynucleotide sequence of SEQ ID NO:X, and/or encoded by the cDNA contained in the related cDNA clone contained in a deposited library. Protein (polypeptide) fragments may be “free-standing,” or comprised within a larger polypeptide of which the fragment forms a part or region, most preferably as a single continuous region. Representative examples of polypeptide fragments of the invention, include, for example, fragments comprising, or alternatively consisting of, an amino acid sequence from about amino acid number 1-20, 21-40, 41-60, 61-80, 81-100, 102-120, 121-140, 141-160, 161-180, 181-200, 201-220, 221-240, 241-260, 261-280, 281-300, 301-320, 321-340 341-360, 361-380, 381-400, 401-420, 421-440, 441-460, 461-480, 481-500, 501-520, 521-540, 541-560, 561-580, 581-600, 601-620, 621-640, 641-660, 661-680, 681-700, 701-720, 721-740, 741-760, 761-780, 781-800, 801-820, 821-840, 841-860, 861-880, 881-900, 901-920, 921-940, 941-960, 961-980, 981-1000, 1001-1020, 1021-1040, 1041-1060, 1061-1080, 1081-1100, 1101-1120, 1121-1140, 1141-1160, 1161-1180, and 1181 to the end of SEQ ID NO:Y. Moreover, polypeptide fragments of the invention may be at least about 10, 15, 20, 25, 30, 35, 40, 45, 50, 55, 60, 65, 70, 75, 80, 85, 90, 100, 110, 120, 130, 140, or 150 amino acids in length. In this context “about” includes the particularly recited ranges or values, or ranges or values larger or smaller by several (5, 4, 3, 2, or 1) amino acids, at either terminus or at both termini. Polynucleotides encoding these polypeptide fragments are also encompassed by the invention.

[0095] Even if deletion of one or more amino acids from the N-terminus of a protein results in modification of loss of one or more biological functions of the protein, other functional activities (e.g., biological activities, ability to multimerize, ability to bind a ligand) may still be retained. For example, the ability of shortened muteins to induce and/or bind to antibodies which recognize the complete or mature forms of the polypeptides generally will be retained when less than the majority of the residues of the complete or mature polypeptide are removed from the N-terminus. Whether a particular polypeptide lacking N-terminal residues of a complete polypeptide retains such immunologic activities can readily be determined by routine methods described herein and otherwise known in the art. It is not unlikely that a mutein with a large number of deleted N-terminal amino acid residues may retain some biological or immunogenic activities. In fact, peptides composed of as few as six amino acid residues may often evoke an immune response.

[0096] Accordingly, polypeptide fragments of the invention include the secreted protein as well as the mature form. Further preferred polypeptide fragments include the secreted protein or the mature form having a continuous series of deleted residues from the amino or the carboxy terminus, or both. For example, any number of amino acids, ranging from 1-60, can be deleted from the amino terminus of either the secreted polypeptide or the mature form. Similarly, any number of amino acids, ranging from 1-30, can be deleted from the carboxy terminus of the secreted protein or mature form. Furthermore, any combination of the above amino and carboxy terminus deletions are preferred. Similarly, polynucleotides encoding these polypeptide fragments are also preferred.

[0097] The present invention further provides polypeptides having one or more residues deleted from the amino terminus of the amino acid sequence of a polypeptide disclosed herein (e.g., a polypeptide of SEQ ID NO:Y, a polypeptide encoded by the polynucleotide sequence contained in SEQ ID NO:X, and/or a polypeptide encoded by the cDNA contained in the related cDNA clone contained in a deposited library). In particular, N-terminal deletions may be described by the general formula m-q, where q is a whole integer representing the total number of amino acid residues in a polypeptide of the invention (e.g., the polypeptide disclosed in SEQ ID NO:Y), and m is defined as any integer ranging from 2 to q-6. Polynucleotides encoding these polypeptides are also encompassed by the invention.

[0098] Also as mentioned above, even if deletion of one or more amino acids from the C-terminus of a protein results in modification of loss of one or more biological functions of the protein, other functional activities (e.g., biological activities, ability to multimerize, ability to bind a ligand) may still be retained. For example the ability of the shortened mutein to induce and/or bind to antibodies which recognize the complete or mature forms of the polypeptide generally will be retained when less than the majority of the residues of the complete or mature polypeptide are removed from the C-terminus. Whether a particular polypeptide lacking C-terminal residues of a complete polypeptide retains such immunologic activities can readily be determined by routine methods described herein and otherwise known in the art. It is not unlikely that a mutein with a large number of deleted C-terminal amino acid residues may retain some biological or immunogenic activities. In fact, peptides composed of as few as six amino acid residues may often evoke an immune response.

[0099] Accordingly, the present invention further provides polypeptides having one or more residues from the carboxy terminus of the amino acid sequence of a polypeptide disclosed herein (e.g., a polypeptide of SEQ ID NO:Y, a polypeptide encoded by the polynucleotide sequence contained in SEQ ID NO:X, and/or a polypeptide encoded by the cDNA contained in deposited cDNA clone referenced in Table 1). In particular, C-terminal deletions may be described by the general formula 1-n, where n is any whole integer ranging from 6 to q-1, and where n corresponds to the position of an amino acid residue in a polypeptide of the invention. Polynucleotides encoding these polypeptides are also encompassed by the invention.

[0100] In addition, any of the above described N- or C-terminal deletions can be combined to produce a N- and C-terminal deleted polypeptide. The invention also provides polypeptides having one or more amino acids deleted from both the amino and the carboxyl termini, which may be described generally as having residues m-n of a polypeptide encoded by SEQ ID NO:X (e.g., including, but not limited to, the preferred polypeptide disclosed as SEQ ID NO:Y), and/or the cDNA in the related cDNA clone contained in a deposited library, where n and m are integers as described above. Polynucleotides encoding these polypeptides are also encompassed by the invention.

[0101] Any polypeptide sequence contained in the polypeptide of SEQ I) NO:Y, encoded by the polynucleotide sequences set forth as SEQ ID NO:X, or encoded by the cDNA in the related cDNA clone contained in a deposited library may be analyzed to determine certain preferred regions of the polypeptide. For example, the amino acid sequence of a polypeptide encoded by a polynucleotide sequence of SEQ ID NO:X, or the cDNA in a deposited cDNA clone may be analyzed using the default parameters of the DNASTAR computer algorithm (DNASTAR, Inc., 1228 S. Park St., Madison, Wis. 53715 USA; http://www.dnastar.com/).

[0102] Polypeptide regions that may be routinely obtained using the DNASTAR computer algorithm include, but are not limited to, Garnier-Robson alpha-regions, beta-regions, turn-regions, and coil-regions, Chou-Fasman alpha-regions, beta-regions, and turn-regions, Kyte-Doolittle hydrophilic regions and hydrophobic regions, Eisenberg alpha- and beta-amphipathic regions, Karplus-Schulz flexible regions, Emini surface-forming regions and Jameson-Wolf regions of high antigenic index. Among highly preferred polynucleotides of the invention in this regard are those that encode polypeptides comprising regions that combine several structural features, such as several (e.g., 1, 2, 3 or 4) of the features set out above.

[0103] Additionally, Kyte-Doolittle hydrophilic regions and hydrophobic regions, Emini surface-forming regions, and Jameson-Wolf regions of high antigenic index (i.e., containing four or more contiguous amino acids having an antigenic index of greater than or equal to 1.5, as identified using the default parameters of the Jameson-Wolf program) can routinely be used to determine polypeptide regions that exhibit a high degree of potential for antigenicity. Regions of high antigenicity are determined from data by DNASTAR analysis by choosing values which represent regions of the polypeptide which are likely to be exposed on the surface of the polypeptide in an environment in which antigen recognition may occur in the process of initiation of an immune response.

[0104] Preferred polypeptide fragments of the invention are fragments comprising, or alternatively consisting of, an amino acid sequence that displays a functional activity of the polypeptide sequence of which the amino acid sequence is a fragment.

[0105] By a polypeptide demonstrating a “functional activity” is meant, a polypeptide capable of displaying one or more known functional activities associated with a full-length (complete) protein of the invention. Such functional activities include, but are not limited to, biological activity, antigenicity [ability to bind (or compete with a polypeptide for binding) to an anti-polypeptide antibody], immunogenicity (ability to generate antibody which binds to a specific polypeptide of the invention), ability to form multimers with polypeptides of the invention, and ability to bind to a receptor or ligand for a polypeptide.

[0106] Other preferred polypeptide fragments are biologically active fragments. Biologically active fragments are those exhibiting activity similar, but not necessarily identical, to an activity of the polypeptide of the present invention. The biological activity of the fragments may include an improved desired activity, or a decreased undesirable activity.

[0107] In preferred embodiments, polypeptides of the invention comprise, or alternatively consist of, one, two, three, four, five or more of the antigenic fragments of the polypeptide of SEQ ID NO:Y, or portions thereof. Polynucleotides encoding these polypeptides are also encompassed by the invention.

TABLE 4

| Sequence/ | |
|---|---|
| Contig ID | Epitope |
| 462108 | Preferred epitopes include those comprising a sequence shown in SEQ ID NO. 461 as |
| | residues: Ile-1 to Arg-9, Val-26 to Val-41, Met-46 to Cys-51, Trp-88 to Gln-93, Glu- |
| | 124 to Trp-130, Gly-339 to Pro-344. |
| 503446 | Preferred epitopes include those comprising a sequence shown in SEQ ID NO. 462 as |
| | residues: Leu-54 to Leu-60. |
| 507841 | Preferred epitopes include those comprising a sequence shown in SEQ ID NO. 463 as |
| | residues: Tyr-39 to Trp-44. |
| 509287 | Preferred epitopes include those comprising a sequence shown in SEQ ID NO. 464 as |
| | residues: Arg-6 to Val-12, Thr-38 to Asn-43, Arg-69 to Asp-74, Trp-87 to Lys-97, |
| | His-136 to Met-142, Ala-149 to Lys-160. |
| 509672 | Preferred epitopes include those comprising a sequence shown in SEQ ID NO. 465 as |
| | residues: Ser-33 to Cys-39. |
| 524112 | Preferred epitopes include those comprising a sequence shown in SEQ ID NO. 469 as |
| | residues: Asp-1 to Gly-6, Pro-30 to Gly-40, Leu-46 to Asn-52, Asp-54 to Gly-61. |
| 525971 | Preferred epitopes include those comprising a sequence shown in SEQ ID NO. 470 as |
| | residues: Pro-13 to Arg-21, Leu-30 to Thr-35, Pro-43 to Ser-51. |
| 527156 | Preferred epitopes include those comprising a sequence shown in SEQ ID NO. 471 as |
| | residues: Ala-2 to Pro-7. |
| 532502 | Preferred epitopes include those comprising a sequence shown in SEQ ID NO. 472 as |
| | residues: Lys-1 to Ser-6. |
| 533459 | Preferred epitopes include those comprising a sequence shown in SEQ ID NO. 473 as |
| | residues: Gly-1 to Trp-7, Ile-155 to Gly-163. |
| 533551 | Preferred epitopes include those comprising a sequence shown in SEQ ID NO. 474 as |
| | residues: Lys-15 to Leu-20. |
| 537850 | Preferred epitopes include those comprising a sequence shown in SEQ ID NO. 475 as |
| | residues: Ile-43 to Leu-49, Cys-85 to Lys-92, Phe-138 to Leu-144. |
| 537925 | Preferred epitopes include those comprising a sequence shown in SEQ ID NO. 476 as |
| | residues: Gln-17 to Ser-24, Ala-47 to Asn-52. |
| 540802 | Preferred epitopes include those comprising a sequence shown in SEQ ID NO. 479 as |
| | residues: Leu-3 to Trp-9, Arg-20 to Phe-29, Glu-58 to Gln-65. |
| 540989 | Preferred epitopes include those comprising a sequence shown in SEQ ID NO. 480 as |
| | residues: Ser-52 to Gly-57, Thr-64 to Asn-70. |
| 540997 | Preferred epitopes include those comprising a sequence shown in SEQ ID NO. 481 as |
| | residues: Ile-1 to Thr-11. |
| 548735 | Preferred epitopes include those comprising a sequence shown in SEQ ID NO. 482 as |
| | residues: Gln-17 to Asn-22, Ser-38 to Pro-45, Asn-75 to Leu-84, Glu-97 to Pro-110. |
| 549709 | Preferred epitopes include those comprising a sequence shown in SEQ ID NO. 483 as |
| | residues: Phe-65 to Trp-77. |
| 550007 | Preferred epitopes include those comprising a sequence shown in SEQ ID NO. 484 as |
| | residues: Ser-4 to Ser-13, Leu-22 to Cys-40, Gly-42 to Gly-50, Thr-88 to Glu-97, Leu- |
| | 184 to Gln-190, Pro-206 to Gly-211. |
| 550118 | Preferred epitopes include those comprising a sequence shown in SEQ ID NO. 485 as |
| | residues: Gly-1 to Gly-7, Trp-10 to Met-24, Gln-91 to Gly-98. |
| 550870 | Preferred epitopes include those comprising a sequence shown in SEQ ID NO. 487 as |
| | residues: Arg-26 to Arg-33, Gln-47 to Asn-52, Trp-61 to Ser-71, Gly-93 to Trp-100. |
| 553765 | Preferred epitopes include those comprising a sequence shown in SEQ ID NO. 489 as |
| | residues: Thr-8 to Thr-19, Arg-108 to Ser-115, Ser-117 to Arg-128, Phe-143 to Tyr- |
| | 155, Leu-171 to Arg-177, Asn-182 to Gly-187, Gly-195 to Ser-200, Arg-232 to Thr- |
| | 248, Pro-287 to Arg-293. |
| 554050 | Preferred epitopes include those comprising a sequence shown in SEQ ID NO. 490 as |
| | residues: Asp-49 to Lys-54, Glu-80 to Glu-86, Lys-121 to Leu-126, Thr-160 to Val- |
| | 165, Ile-176 to Gly-181. |
| 554186 | Preferred epitopes include those comprising a sequence shown in SEQ ID NO. 491 as |
| | residues: Gln-1 to Cys-6, Asn-17 to Ala-24, Ala-157 to Asp-162, Ser-180 to Asp-185, |
| | Leu-219 to Thr-227, Lys-239 to Ile-246, Pro-266 to Asp-271. |
| 554716 | Preferred epitopes include those comprising a sequence shown in SEQ ID NO. 492 as |
| | residues: Thr-2 to His-10, Ser-51 to Ser-58, Ile-84 to Lys-89. |
| 556791 | Preferred epitopes include those comprising a sequence shown in SEQ ID NO. 493 as |
| | residues: Asp-31 to Lys-37, Ser-58 to Phe-63, Lys-70 to Thr-79, Asp-100 to Ile-108. |
| 557121 | Preferred epitopes include those comprising a sequence shown in SEQ ID NO. 494 as |
| | residues: Leu-29 to Gly-35, Ser-39 to Ala-47, Gln-91 to Arg-107. |
| 557199 | Preferred epitopes include those comprising a sequence shown in SEQ ID NO. 495 as |
| | residues: Ser-2 to His-12, Ser-14 to Ser-24, Gly-47 to Tyr-52, Pro-115 to Gly-126. |
| 557293 | Preferred epitopes include those comprising a sequence shown in SEQ ID NO. 496 as |
| | residues: Pro-14 to Gly-21, Pro-25 to Gly-36, Ala-43 to Gly-48, Pro-53 to Gly-78, |
| | Arg-90 to Asp-96, Pro-98 to Gly-103, Gln-117 to His-123, Ala-154 to Tyr-161. |
| 558423 | Preferred epitopes include those comprising a sequence shown in SEQ ID NO. 499 as |
| | residues: Gln-43 to Ile-49, Ala-106 to His-113, Glu-151 to Lys-156, Ala-186 to Arg- |
| | 191, Lys-212 to Leu-223. |
| 558465 | Preferred epitopes include those comprising a sequence shown in SEQ ID NO. 500 as |
| | residues: Arg-1 to Arg-7, Gln-14 to Glu-22, Lys-52 to Gln-57, Lys-89 to Gly-96, Gly- |
| | 103 to Ser-112, Ser-153 to His-168. |
| 558778 | Preferred epitopes include those comprising a sequence shown in SEQ ID NO. 502 as |
| | residues: His-2 to Ser-18. |
| 558818 | Preferred epitopes include those comprising a sequence shown in SEQ ID NO. 503 as |
| | residues: Asp-1 to His-9. |
| 572571 | Preferred epitopes include those comprising a sequence shown in SEQ ID NO. 505 as |
| | residues: Ser-1 to Pro-6, His-26 to Gly-31, Pro-36 to Lys-42, Pro-65 to Val-71. |
| 575525 | Preferred epitopes include those comprising a sequence shown in SEQ ID NO. 506 as |
| | residues: Arg-10 to Pro-19, Thr-34 to Gly-44. |
| 580659 | Preferred epitopes include those comprising a sequence shown in SEQ ID NO. 507 as |
| | residues: Val-17 to Ile-24. |
| 583650 | Preferred epitopes include those comprising a sequence shown in SEQ ID NO. 508 as |
| | residues: Ser-10 to Pro-19, Pro-26 to Ala-31. |
| 585791 | Preferred epitopes include those comprising a sequence shown in SEQ ID NO. 510 as |
| | residues: Ser-40 to Tyr-50, Pro-95 to Thr-125, Lys-131 to Ile-142, Thr-165 to Arg- |
| | 178. |
| 587229 | Preferred epitopes include those comprising a sequence shown in SEQ ID NO. 511 as |
| | residues: Glu-51 to Gly-56, Cys-75 to Lys-87, Pro-98 to Cys-107, Ser-115 to Glu-120, |
| | Ala-139 to Gln-155. |
| 587246 | Preferred epitopes include those comprising a sequence shown in SEQ ID NO. 512 as |
| | residues: Glu-1 to Val-9, Pro-66 to Thr-73, Phe-84 to Trp-93. |
| 592154 | Preferred epitopes include those comprising a sequence shown in SEQ ID NO. 515 as |
| | residues: Pro-17 to Tyr-28, Arg-62 to Cys-68, Lys-75 to Thr-87. |
| 598665 | Preferred epitopes include those comprising a sequence shown in SEQ ID NO. 517 as |
| | residues: Leu-102 to Gln-108, Ser-114 to Asn-123, Asn-155 to Arg-160, Thr-169 to |
| | Pro-175, Ile-201 to Gln-207, Ser-236 to Ala-249, Asp-257 to Trp-262, Pro-275 to Gly- |
| | 282, Pro-320 to Gln-336, Leu-386 to Arg-391. |
| 604719 | Preferred epitopes include those comprising a sequence shown in SEQ ID NO. 518 as |
| | residues: Pro-14 to Cys-25, Val-104 to Ile-110, His-116 to Gln-122, Ser-130 to Glu- |
| | 142, Asn-162 to Asn-168, Arg-185 to Ile-191, Ser-210 to Lys-277. |
| 612689 | Preferred epitopes include those comprising a sequence shown in SEQ ID NO. 519 as |
| | residues: Lys-22 to Thr-29, Asp-39 to Ala-44, Arg-60 to Ser-65. |
| 612980 | Preferred epitopes include those comprising a sequence shown in SEQ ID NO. 520 as |
| | residues: Leu-37 to Gly-44. |
| 615134 | Preferred epitopes include those comprising a sequence shown in SEQ ID NO. 521 as |
| | residues: His-23 to Gly-33, Cys-89 to Arg-95, Asn-127 to Ala-136, Arg-177 to Gln- |
| | 183. |
| 616064 | Preferred epitopes include those comprising a sequence shown in SEQ ID NO. 522 as |
| | residues: Trp-7 to Ser-14, Cys-69 to Glu-80. |
| 616096 | Preferred epitopes include those comprising a sequence shown in SEQ ID NO. 523 as |
| | residues: Pro-11 to Arg-34. |
| 616926 | Preferred epitopes include those comprising a sequence shown in SEQ ID NO. 524 as |
| | residues: Arg-25 to His-39. |
| 634923 | Preferred epitopes include those comprising a sequence shown in SEQ ID NO. 525 as |
| | residues: Tyr-20 to Ser-26, Ser-48 to Asn-54. |
| 647531 | Preferred epitopes include those comprising a sequence shown in SEQ ID NO. 527 as |
| | residues: Asp-24 to Phe-30. |
| 647699 | Preferred epitopes include those comprising a sequence shown in SEQ ID NO. 529 as |
| | residues: Glu-85 to Glu-93, Pro-107 to Asn-116, Gln-185 to His-192. |
| 651706 | Preferred epitopes include those comprising a sequence shown in SEQ ID NO. 530 as |
| | residues: Ser-41 to Gly-47, Gln-63 to Val-71, Tyr-83 to Pro-90, Leu-123 to Ser-128, |
| | Pro-185 to Arg-190, Asp-203 to Asn-210, Lys-232 to Trp-237, Glu-243 to Ser-249, |
| | Gly-281 to Asn-289, Thr-306 to Gly-311. |
| 654015 | Preferred epitopes include those comprising a sequence shown in SEQ ID NO. 533 as |
| | residues: Phe-14 to Tyr-19. |
| 657859 | Preferred epitopes include those comprising a sequence shown in SEQ ID NO. 536 as |
| | residues: His-1 to Trp-10, Pro-12 to Ser-24. |
| 662212 | Preferred epitopes include those comprising a sequence shown in SEQ ID NO. 538 as |
| | residues: Pro-20 to Thr-47, Ser-54 to Pro-61. |
| 662496 | Preferred epitopes include those comprising a sequence shown in SEQ ID NO. 540 as |
| | residues: Thr-51 to Gly-63, Arg-65 to Phe-72, Phe-78 to Asp-86, Ser-89 to Gly-104. |
| 670453 | Preferred epitopes include those comprising a sequence shown in SEQ ID NO. 542 as |
| | residues: His-9 to Gln-14, Ile-112 to Gly-118, Arg-150 to Leu-157, His-187 to Gly- |
| | 197, Pro-229 to Trp-235. |
| 675028 | Preferred epitopes include those comprising a sequence shown in SEQ ID NO. 543 as |
| | residues: Arg-1 to His-9, Asn-35 to Arg-40. |
| 681325 | Preferred epitopes include those comprising a sequence shown in SEQ ID NO. 544 as |
| | residues: Pro-15 to Arg-23. |
| 683103 | Preferred epitopes include those comprising a sequence shown in SEQ ID NO. 545 as |
| | residues: Arg-1 to Ser-7, Ser-37 to Gln-43, Pro-107 to Thr-119, His-146 to Asn-151, |
| | Gly-158 to Gln-177, Glu-201 to Lys-206, Thr-236 to Leu-242, Gly-265 to Arg-271. |
| 684432 | Preferred epitopes include those comprising a sequence shown in SEQ ID NO. 546 as |
| | residues: Asp-1 to Asn-7, Thr-72 to Gly-79, Val-94 to Gly-99, Arg-182 to Ala-191, |
| | Asn-203 to Ser-212. |
| 688018 | Preferred epitopes include those comprising a sequence shown in SEQ ID NO. 547 as |
| | residues: Glu-1 to Trp-11. |
| 691522 | Preferred epitopes include those comprising a sequence shown in SEQ ID NO. 549 as |
| | residues: Tyr-38 to Gly-45, Lys-102 to Leu-109, Lys-114 to Ser-119, Asp-161 to Gln- |
| | 166, Gln-179 to Gly-188. |
| 693706 | Preferred epitopes include those comprising a sequence shown in SEQ ID NO. 550 as |
| | residues: Leu-57 to Phe-62, Leu-100 to Ser-105, Ile-119 to Pro-134, Asn-154 to Asn- |
| | 165, Asp-173 to Lys-186, Leu-213 to Gly-222, Lys-225 to Glu-231, Asp-243 to Glu- |
| | 248, Gln-307 to Lys-315, Glu-317 to Tyr-323, His-327 to Lys-334, Pro-362 to Arg- |
| | 367, Lys-402 to Thr-409, Lys-446 to Glu-457, Arg-577 to Asn-587, Ser-619 to Arg- |
| | 624, Ser-640 to Gly-646, Glu-654 to Gly-660, Pro-669 to Glu-674, Asn-694 to Lys- |
| | 701, Ala-712 to Glu-725, His-749 to Asp-757. |
| 694523 | Preferred epitopes include those comprising a sequence shown in SEQ ID NO. 551 as |
| | residues: Thr-2 to Arg-9, Arg-17 to Glu-33. |
| 697517 | Preferred epitopes include those comprising a sequence shown in SEQ ID NO. 552 as |
| | residues: Val-21 to Leu-27, Glu-30 to His-36. |
| 699054 | Preferred epitopes include those comprising a sequence shown in SEQ ID NO. 553 as |
| | residues: Gln-1 to Gln-17, Leu-24 to Gly-36. |
| 703402 | Preferred epitopes include those comprising a sequence shown in SEQ ID NO. 555 as |
| | residues: Arg-47 to Arg-57, Gln-59 to Tyr-65, Pro-67 to Phe-75, Arg-92 to Phe-97, |
| | Glu-108 to Val-120. |
| 703651 | Preferred epitopes include those comprising a sequence shown in SEQ ID NO. 556 as |
| | residues: Lys-41 to His-51, Asp-65 to Lys-73. |
| 704905 | Preferred epitopes include those comprising a sequence shown in SEQ ID NO. 557 as |
| | residues: Pro-19 to Thr-27, Ala-63 to Ser-71, Leu-92 to Ala-97. |
| 708515 | Preferred epitopes include those comprising a sequence shown in SEQ ID NO. 559 as |
| | residues: Lys-25 to Gly-35, Pro-37 to Met-42, Glu-110 to Glu-119, Leu-123 to Gly- |
| | 128. |
| 710572 | Preferred epitopes include those comprising a sequence shown in SEQ ID NO. 560 as |
| | residues: Trp-1 to Glu-8, Glu-14 to Met-24, Ala-38 to Val-50, Gly-72 to Leu-79. |
| 710618 | Preferred epitopes include those comprising a sequence shown in SEQ ID NO. 561 as |
| | residues: Lys-61 to Asp-66. |
| 711810 | Preferred epitopes include those comprising a sequence shown in SEQ ID NO. 562 as |
| | residues: Arg-1 to Ile-8, Pro-50 to Thr-62. |
| 714933 | Preferred epitopes include those comprising a sequence shown in SEQ ID NO. 563 as |
| | residues: Asp-59 to Ser-71, Asp-86 to Leu-99, Arg-118 to Tyr-123. |
| 716331 | Preferred epitopes include those comprising a sequence shown in SEQ ID NO. 564 as |
| | residues: Met-3 to Ser-9, Leu-86 to Ser-91. |
| 717686 | Preferred epitopes include those comprising a sequence shown in SEQ ID NO. 565 as |
| | residues: Arg-18 to Asn-25. |
| 718187 | Preferred epitopes include those comprising a sequence shown in SEQ ID NO. 566 as |
| | residues: Phe-24 to Lys-29. |
| 719934 | Preferred epitopes include those comprising a sequence shown in SEQ ID NO. 567 as |
| | residues: Ser-36 to Trp-41, Ser-55 to Asn-60, Thr-67 to Phe-74, Ser-87 to Thr-95, |
| | Lys-132 to Gln-144, Ala-186 to Gly-192, Pro-260 to Asn-265, Leu-289 to Tyr-295, |
| | Ala-336 to Gly-347, Gly-386 to Gln-393, Thr-400 to Ser-413. |
| 722980 | Preferred epitopes include those comprising a sequence shown in SEQ ID NO. 568 as |
| | residues: Arg-1 to Gly-9, Ala-54 to Asp-59. |
| 723596 | Preferred epitopes include those comprising a sequence shown in SEQ ID NO. 569 as |
| | residues: Glu-65 to Tyr-70. |
| 724352 | Preferred epitopes include those comprising a sequence shown in SEQ ID NO. 570 as |
| | residues: Val-6 to Asn-20, His-45 to Pro-56. |
| 724904 | Preferred epitopes include those comprising a sequence shown in SEQ ID NO. 573 as |
| | residues: Glu-4 to Leu-14, Arg-52 to Lys-58, Asp-60 to Ile-70, Val-85 to Asp-92, Pro- |
| | 99 to Arg-111. |
| 725642 | Preferred epitopes include those comprising a sequence shown in SEQ ID NO. 574 as |
| | residues: Arg-1 to Thr-14, Pro-28 to Asp-33, Lys-92 to Leu-101. |
| 726192 | Preferred epitopes include those comprising a sequence shown in SEQ ID NO. 575 as |
| | residues: Val-7 to Ser-15. |
| 730930 | Preferred epitopes include those comprising a sequence shown in SEQ ID NO. 577 as |
| | residues: Phe-12 to Thr-18, Leu-30 to Leu-36, Thr-56 to Ser-62, Ile-115 to Phe-120. |
| 732386 | Preferred epitopes include those comprising a sequence shown in SEQ ID NO. 579 as |
| | residues: Thr-1 to Leu-12, Gly-39 to Gln-44, Thr-52 to Pro-59, Ser-88 to Pro-95, Val- |
| | 122 to Gln-132, Asp-139 to Glu-144, Ser-177 to Ala-182, Gln-200 to Gly-207. |
| 732909 | Preferred epitopes include those comprising a sequence shown in SEQ ID NO. 580 as |
| | residues: Glu-45 to Arg-51, Pro-107 to Lys-115. |
| 733088 | Preferred epitopes include those comprising a sequence shown in SEQ ID NO. 581 as |
| | residues: Phe-6 to Pro-13, Glu-24 to Asn-32, Arg-58 to Asn-64, Arg-87 to Ile-95. |
| 734760 | Preferred epitopes include those comprising a sequence shown in SEQ ID NO. 584 as |
| | residues: Glu-1 to Trp-13, Gln-15 to Asp-22. |
| 735711 | Preferred epitopes include those comprising a sequence shown in SEQ ID NO. 585 as |
| | residues: Gln-11 to His-19, Val-30 to Ile-36, Pro-63 to Ser-69, Gly-78 to Ser-83, Ser- |
| | 92 to Tyr-97, Gln-155 to Glu-161, Gly-237 to Thr-244. |
| 742413 | Preferred epitopes include those comprising a sequence shown in SEQ ID NO. 586 as |
| | residues: Gly-47 to Tyr-52, Thr-56 to Leu-62, Ser-65 to Thr-76, Leu-103 to Asp-144, |
| | Lys-149 to Leu-154, Asn-190 to Ser-198. |
| 742676 | Preferred epitopes include those comprising a sequence shown in SEQ ID NO. 587 as |
| | residues: Asn-2 to Ala-7. |
| 742781 | Preferred epitopes include those comprising a sequence shown in SEQ ID NO. 588 as |
| | residues: Thr-40 to Val-45, Lys-59 to Ser-64. |
| 743356 | Preferred epitopes include those comprising a sequence shown in SEQ ID NO. 589 as |
| | residues: Gly-4 to Lys-10. |
| 750986 | Preferred epitopes include those comprising a sequence shown in SEQ ID NO. 592 as |
| | residues: Arg-1 to Lys-7, Asn-20 to Gln-27, Phe-49 to Asn-58, Glu-63 to Gln-69, Gln- |
| | 73 to Thr-78, Gln-136 to Leu-141, Ala-145 to Lys-153. |
| 751068 | Preferred epitopes include those comprising a sequence shown in SEQ ID NO. 593 as |
| | residues: Thr-5 to Ser-11. |
| 751164 | Preferred epitopes include those comprising a sequence shown in SEQ ID NO. 594 as |
| | residues: Gly-24 to Gly-32. |
| 751890 | Preferred epitopes include those comprising a sequence shown in SEQ ID NO. 595 as |
| | residues: Ala-24 to Ser-29. |
| 751991 | Preferred epitopes include those comprising a sequence shown in SEQ ID NO. 596 as |
| | residues: Tyr-1 to Gly-21, Ala-23 to Thr-29. |
| 752449 | Preferred epitopes include those comprising a sequence shown in SEQ ID NO. 597 as |
| | residues: Ser-17 to Thr-25. |
| 752504 | Preferred epitopes include those comprising a sequence shown in SEQ ID NO. 598 as |
| | residues: Arg-11 to Pro-26, Ala-37 to Asp-45, Asp-51 to Val-59, Glu-80 to Asp-98, |
| | Pro-104 to Trp-112, Asp-114 to Phe-124, Pro-140 to Pro-147, Pro-153 to Ala-158. |
| 752688 | Preferred epitopes include those comprising a sequence shown in SEQ ID NO. 599 as |
| | residues: Gly-1 to Pro-9, Arg-26 to Asp-31, Asp-33 to Val-58, Pro-71 to Ala-77, Ser- |
| | 87 to Gly-95. |
| 752889 | Preferred epitopes include those comprising a sequence shown in SEQ ID NO. 600 as |
| | residues: Thr-1 to Lys-10. |
| 753150 | Preferred epitopes include those comprising a sequence shown in SEQ ID NO. 601 as |
| | residues: His-16 to Glu-35, Leu-43 to Tyr-55, His-68 to Gly-75, Ser-83 to Leu-89, |
| | Glu-106 to Ser-248, Ser-250 to Glu-306. |
| 754479 | Preferred epitopes include those comprising a sequence shown in SEQ ID NO. 603 as |
| | residues: Leu-47 to Ala-52, Ser-60 to Arg-80. |
| 757127 | Preferred epitopes include those comprising a sequence shown in SEQ ID NO. 606 as |
| | residues: Thr-25 to Ser-36. |
| 757495 | Preferred epitopes include those comprising a sequence shown in SEQ ID NO. 608 as |
| | residues: Arg-1 to Asp-6, Gln-46 to Val-59, Arg-93 to Ser-101, Gln-103 to Val-111, |
| | Pro-114 to Ser-119, Arg-138 to Glu-144, Ala-206 to Thr-212, Asn-228 to Asn-236, |
| | Asp-245 to Val-253, Pro-264 to Asp-270, His-295 to Asp-302, Leu-339 to Glu-349. |
| 757715 | Preferred epitopes include those comprising a sequence shown in SEQ ID NO. 609 as |
| | residues: Pro-1 to Val-15, Phe-21 to Val-27. |
| 760388 | Preferred epitopes include those comprising a sequence shown in SEQ ID NO. 610 as |
| | residues: Thr-24 to Gln-29, Val-56 to Gly-61. |
| 760433 | Preferred epitopes include those comprising a sequence shown in SEQ ID NO. 611 as |
| | residues: Thr-17 to Gln-33, Pro-35 to Arg-46, Ser-51 to Ala-58, Ser-98 to Leu-104, |
| | Phe-126 to Gly-137, Arg-139 to Leu-144, Ser-147 to Glu-153, Ala-164 to Gly-172. |
| 760545 | Preferred epitopes include those comprising a sequence shown in SEQ ID NO. 612 as |
| | residues: Met-1 to Phe-6. |
| 761566 | Preferred epitopes include those comprising a sequence shown in SEQ ID NO. 613 as |
| | residues: Glu-38 to Gly-43. |
| 761740 | Preferred epitopes include those comprising a sequence shown in SEQ ID NO. 614 as |
| | residues: Pro-35 to Asn-42, Lys-79 to Lys-84, Phe-131 to Cys-136. |
| 766686 | Preferred epitopes include those comprising a sequence shown in SEQ ID NO. 617 as |
| | residues: His-36 to Arg-48. |
| 767396 | Preferred epitopes include those comprising a sequence shown in SEQ ID NO. 618 as |
| | residues: Gln-33 to Asp-44, Pro-58 to Thr-79. |
| 767501 | Preferred epitopes include those comprising a sequence shown in SEQ ID NO. 619 as |
| | residues: Asp-1 to His-6, His-27 to Lys-37, Asn-141 to His-147, Asp-233 to Thr-239. |
| 767945 | Preferred epitopes include those comprising a sequence shown in SEQ ID NO. 620 as |
| | residues: Leu-5 to Leu-15. |
| 771415 | Preferred epitopes include those comprising a sequence shown in SEQ ID NO. 622 as |
| | residues: Gly-1 to Gly-9. |
| 772657 | Preferred epitopes include those comprising a sequence shown in SEQ ID NO. 623 as |
| | residues: Arg-1 to Gly-7, Gly-9 to Pro-21, Gly-39 to Arg-49, Thr-68 to Asn-73, Asp- |
| | 78 to Arg-85, Thr-107 to Gln-116, Gln-147 to Arg-163, Gln-172 to Lys-187, Gln-240 |
| | to His-270, Tyr-282 to Ser-290. |
| 773193 | Preferred epitopes include those comprising a sequence shown in SEQ ID NO. 625 as |
| | residues: Gly-1 to Glu-13, Thr-29 to Ser-41, Gln-112 to His-123, Arg-133 to Gly-143. |
| 773710 | Preferred epitopes include those comprising a sequence shown in SEQ ID NO. 626 as |
| | residues: Ala-89 to Gly-94, Gly-108 to Thr-116, Leu-162 to Ala-167, Pro-169 to Ser- |
| | 176, Val-217 to Arg-222. |
| 774283 | Preferred epitopes include those comprising a sequence shown in SEQ ID NO. 627 as |
| | residues: Asp-47 to Thr-71, Asp-78 to Ser-86, Pro-98 to Cys-103, Val-120 to Thr-129. |
| 774369 | Preferred epitopes include those comprising a sequence shown in SEQ ID NO. 628 as |
| | residues: Tyr-20 to Gly-26, Thr-36 to Ser-41, Lys-58 to Thr-64. |
| 774754 | Preferred epitopes include those comprising a sequence shown in SEQ ID NO. 629 as |
| | residues: Cys-5 to Glu-27, Glu-51 to Leu-75, Leu-86 to Phe-93, Val-169 to Lys-182, |
| | Ile-200 to Gln-206, Ala-250 to Met-257, Ser-301 to Asn-313, Asp-333 to Glu-342, |
| | Leu-344 to Asp-359, Asp-370 to Glu-381, Ser-390 to Gln-396. |
| 774823 | Preferred epitopes include those comprising a sequence shown in SEQ ID NO. 630 as |
| | residues: Leu-6 to Gln-12. |
| 775510 | Preferred epitopes include those comprising a sequence shown in SEQ ID NO. 631 as |
| | residues: Ser-15 to Ala-22. |
| 775640 | Preferred epitopes include those comprising a sequence shown in SEQ ID NO. 633 as |
| | residues: Ser-18 to Tyr-28. |
| 775802 | Preferred epitopes include those comprising a sequence shown in SEQ ID NO. 634 as |
| | residues: Val-1 to Glu-7. |
| 777470 | Preferred epitopes include those comprising a sequence shown in SEQ ID NO. 635 as |
| | residues: Arg-1 to Thr-11, Ala-45 to Glu-52, Cys-76 to Thr-88, Ala-94 to Arg-105, |
| | Asp-170 to Phe-178. |
| 779273 | Preferred epitopes include those comprising a sequence shown in SEQ ID NO. 638 as |
| | residues: Glu-46 to Phe-51, Pro-88 to Phe-95, Gly-104 to Val-110. |
| 779297 | Preferred epitopes include those comprising a sequence shown in SEQ ID NO. 639 as |
| | residues: Leu-25 to Arg-36, Ala-55 to Ser-60, Arg-67 to Tyr-84, Met-94 to Ala-100. |
| 779664 | Preferred epitopes include those comprising a sequence shown in SEQ ID NO. 640 as |
| | residues: Arg-34 to Ile-44, Ile-87 to Lys-108, Ile-128 to Met-139, Asp-143 to Gly-148. |
| 781579 | Preferred epitopes include those comprising a sequence shown in SEQ ID NO. 644 as |
| | residues: Gly-16 to Ser-37, Phe-83 to Asp-90. |
| 782052 | Preferred epitopes include those comprising a sequence shown in SEQ ID NO. 645 as |
| | residues: Arg-1 to Cys-12, Glu-15 to Pro-24. |
| 782393 | Preferred epitopes include those comprising a sequence shown in SEQ ID NO. 646 as |
| | residues: Tyr-1 to Gly-13, Gly-32 to Ser-39, Glu-71 to Ser-77. |
| 782907 | Preferred epitopes include those comprising a sequence shown in SEQ ID NO. 647 as |
| | residues: Ala-3 to Asp-22. |
| 783220 | Preferred epitopes include those comprising a sequence shown in SEQ ID NO. 648 as |
| | residues: Ser-8 to Leu-28, Asp-30 to Glu-43, Arg-48 to Pro-70, Glu-87 to Arg-97, |
| | Lys-106 to Pro-114. |
| 783300 | Preferred epitopes include those comprising a sequence shown in SEQ ID NO. 649 as |
| | residues: Thr-1 to Trp-15. |
| 783938 | Preferred epitopes include those comprising a sequence shown in SEQ ID NO. 650 as |
| | residues: Leu-13 to Arg-18, Lys-62 to Val-70, Phe-98 to Arg-107. |
| 784024 | Preferred epitopes include those comprising a sequence shown in SEQ ID NO. 651 as |
| | residues: Val-2 to Glu-7, Cys-15 to Tyr-32, Pro-52 to Arg-59. |
| 784575 | Preferred epitopes include those comprising a sequence shown in SEQ ID NO. 652 as |
| | residues: Asn-39 to His-44, Asp-59 to Met-64. |
| 785006 | Preferred epitopes include those comprising a sequence shown in SEQ ID NO. 653 as |
| | residues: Tyr-1 to Thr-10, Pro-12 to Pro-21. |
| 785237 | Preferred epitopes include those comprising a sequence shown in SEQ ID NO. 655 as |
| | residues: Glu-22 to Gln-29. |
| 786111 | Preferred epitopes include those comprising a sequence shown in SEQ ID NO. 656 as |
| | residues: Ala-1 to Thr-20, Cys-50 to Cys-63, Arg-70 to His-76, Pro-85 to Trp-93. |
| 787036 | Preferred epitopes include those comprising a sequence shown in SEQ ID NO. 657 as |
| | residues: Thr-31 to Gln-44, Ser-52 to Glu-57, Phe-73 to Ala-80, Thr-87 to Ser-94. |
| 789626 | Preferred epitopes include those comprising a sequence shown in SEQ ID NO. 660 as |
| | residues: Val-68 to Ser-74. |
| 789703 | Preferred epitopes include those comprising a sequence shown in SEQ ID NO. 661 as |
| | residues: Thr-8 to Lys-28, Cys-88 to Lys-96, Arg-98 to Ile-106, Asn-139 to Val-146, |
| | Glu-149 to Glu-162, Ser-172 to Arg-179, His-191 to Arg-196, Glu-214 to Leu-219, |
| | Glu-225 to Lys-260. |
| 790848 | Preferred epitopes include those comprising a sequence shown in SEQ ID NO. 663 as |
| | residues: Ser-47 to Lys-54. |
| 790912 | Preferred epitopes include those comprising a sequence shown in SEQ ID NO. 665 as |
| | residues: Gly-1 to Met-8, Arg-36 to Arg-43. |
| 791386 | Preferred epitopes include those comprising a sequence shown in SEQ ID NO. 666 as |
| | residues: Ser-20 to Gly-31, Phe-35 to Trp-45, Glu-52 to Trp-65, Thr-70 to Asp-78, |
| | Ala-86 to Gly-99, Glu-101 to Ala-106, Pro-112 to Trp-122. |
| 791598 | Preferred epitopes include those comprising a sequence shown in SEQ ID NO. 667 as |
| | residues: Arg-19 to Ala-30. |
| 791619 | Preferred epitopes include those comprising a sequence shown in SEQ ID NO. 668 as |
| | residues: Pro-39 to Asn-48, Ser-58 to Ile-69, Pro-72 to Gln-80, Ser-82 to Lys-103, |
| | Glu-111 to Pro-122, Ser-128 to Gln-157, Glu-172 to Ser-177. |
| 791628 | Preferred epitopes include those comprising a sequence shown in SEQ ID NO. 669 as |
| | residues: Ala-33 to Asp-39, Ala-81 to Ser-100. |
| 791751 | Preferred epitopes include those comprising a sequence shown in SEQ ID NO. 670 as |
| | residues: Arg-63 to Arg-72. |
| 792557 | Preferred epitopes include those comprising a sequence shown in SEQ ID NO. 671 as |
| | residues: Lys-51 to Arg-58. |
| 792568 | Preferred epitopes include those comprising a sequence shown in SEQ ID NO. 672 as |
| | residues: Glu-1 to Cys-9, Thr-65 to Leu-70, Asp-86 to Arg-92, Pro-132 to His-138. |
| 793507 | Preferred epitopes include those comprising a sequence shown in SEQ ID NO. 676 as |
| | residues: Pro-20 to Thr-25, Arg-60 to Asp-65. |
| 793546 | Preferred epitopes include those comprising a sequence shown in SEQ ID NO. 677 as |
| | residues: Pro-51 to Ser-56, Ser-62 to Thr-71, Leu-100 to Tyr-105, Pro-179 to Ala-186, |
| | Pro-200 to Lys-205, Glu-238 to Glu-243, Lys-250 to Tyr-261, Gln-317 to Gln-322. |
| 793559 | Preferred epitopes include those comprising a sequence shown in SEQ ID NO. 678 as |
| | residues: Gly-43 to Gln-48. |
| 794121 | Preferred epitopes include those comprising a sequence shown in SEQ ID NO. 680 as |
| | residues: Ala-1 to Glu-9, Gly-21 to Lys-29, Leu-31 to Lys-46, Pro-79 to Pro-85, Ser- |
| | 111 to Leu-121, Arg-123 to Asn-138, Pro-146 to Arg-156. |
| 794295 | Preferred epitopes include those comprising a sequence shown in SEQ ID NO. 681 as |
| | residues: Arg-14 to Asp-21, Glu-29 to Ala-35, Thr-61 to Lys-66, Arg-91 to Gly-102, |
| | Ser-131 to Arg-144. |
| 795241 | Preferred epitopes include those comprising a sequence shown in SEQ ID NO. 682 as |
| | residues: Pro-5 to Asp-14, Pro-66 to Asn-74, Pro-83 to Asp-89, Glu-99 to His-104, |
| | Glu-116 to Ala-124, Leu-135 to Ala-142. |
| 795286 | Preferred epitopes include those comprising a sequence shown in SEQ ID NO. 683 as |
| | residues: Asn-13 to Thr-20. |
| 795637 | Preferred epitopes include those comprising a sequence shown in SEQ ID NO. 684 as |
| | residues: Phe-5 to Gly-17, His-68 to Glu-74, Pro-198 to Leu-203, Glu-205 to Lys-211, |
| | Val-245 to Trp-256, Phe-292 to Asn-297, Asp-325 to Gly-330, Gly-344 to Gln-360, |
| | Gly-379 to Gly-385, Gly-418 to Ser-427. |
| 796301 | Preferred epitopes include those comprising a sequence shown in SEQ ID NO. 685 as |
| | residues: Ala-4 to Asp-11, Ala-34 to Ser-43, Asp-50 to Ser-64, Arg-78 to Thr-95, Pro- |
| | 104 to Ser-110, Ser-140 to Arg-148. |
| 796590 | Preferred epitopes include those comprising a sequence shown in SEQ ID NO. 688 as |
| | residues: Met-34 to Asp-42, Tyr-51 to Ala-56, Pro-67 to Leu-73, Ile-81 to Gly-88, |
| | Arg-166 to Val-172. |
| 799783 | Preferred epitopes include those comprising a sequence shown in SEQ ID NO. 689 as |
| | residues: Val-1 to Arg-9, Arg-26 to Gln-32, Arg-51 to Leu-63. |
| 799784 | Preferred epitopes include those comprising a sequence shown in SEQ ID NO. 690 as |
| | residues: Lys-19 to Arg-25, Phe-44 to Gln-49, Leu-70 to Ser-76. |
| 799786 | Preferred epitopes include those comprising a sequence shown in SEQ ID NO. 692 as |
| | residues: Thr-1 to Arg-19, Pro-22 to Arg-39, Pro-51 to Cys-78. |
| 799800 | Preferred epitopes include those comprising a sequence shown in SEQ ID NO. 694 as |
| | residues: Arg-8 to Ser-15, Thr-22 to Gly-43. |
| 799808 | Preferred epitopes include those comprising a sequence shown in SEQ ID NO. 695 as |
| | residues: Tyr-21 to Ser-26. |
| 799977 | Preferred epitopes include those comprising a sequence shown in SEQ ID NO. 696 as |
| | residues: Ser-28 to Ser-42. |
| 800189 | Preferred epitopes include those comprising a sequence shown in SEQ ID NO. 698 as |
| | residues: Arg-3 to Gln-14, Gln-18 to Gln-25, Lys-30 to Ser-36, Lys-75 to Thr-86, Glu- |
| | 100 to Ser-107. |
| 800589 | Preferred epitopes include those comprising a sequence shown in SEQ ID NO. 699 as |
| | residues: Asp-1 to Asn-9, Lys-18 to Trp-31. |
| 800811 | Preferred epitopes include those comprising a sequence shown in SEQ ID NO. 700 as |
| | residues: Ser-1 to Leu-36, Leu-45 to Pro-78, Pro-80 to Thr-88, Leu-98 to Gly-123, |
| | Pro-126 to Ser-133, Asn-136 to Ser-149, Pro-160 to Gly-191. |
| 805818 | Preferred epitopes include those comprising a sequence shown in SEQ ID NO. 703 as |
| | residues: His-20 to Pro-25, Arg-72 to Ala-85, Pro-87 to His-102, Pro-128 to Arg-137, |
| | Met-145 to Leu-152, Arg-193 to Gly-199, Gly-269 to Arg-276, Pro-279 to Glu-284. |
| 806579 | Preferred epitopes include those comprising a sequence shown in SEQ ID NO. 705 as |
| | residues: Pro-54 to Ser-61, Leu-68 to Gln-74. |
| 812314 | Preferred epitopes include those comprising a sequence shown in SEQ ID NO. 709 as |
| | residues: Arg-1 to Gly-7, Leu-9 to Ser-16, Arg-25 to Cys-35. |
| 812443 | Preferred epitopes include those comprising a sequence shown in SEQ ID NO. 710 as |
| | residues: Lys-10 to Lys-24, Gln-30 to Glu-38, Thr-51 to Glu-62, Lys-85 to Tyr-90, |
| | Glu-171 to Trp-176, Gly-182 to Pro-188. |
| 812498 | Preferred epitopes include those comprising a sequence shown in SEQ ID NO. 711 as |
| | residues: Gly-57 to Ser-67. |
| 813079 | Preferred epitopes include those comprising a sequence shown in SEQ ID NO. 713 as |
| | residues: Asn-1 to Tyr-6, Met-24 to Asp-31, Glu-129 to Gly-135, Asp-164 to Lys-169. |
| 815889 | Preferred epitopes include those comprising a sequence shown in SEQ ID NO. 714 as |
| | residues: Lys-47 to Ile-64, Asp-72 to Glu-77, Lys-105 to Ala-111, Asp-145 to Gly- |
| | 150, Asn-167 to Glu-172, Phe-180 to Gln-190. |
| 824358 | Preferred epitopes include those comprising a sequence shown in SEQ ID NO. 715 as |
| | residues: Ser-27 to Lys-32, Tyr-53 to Val-58, Lys-84 to Cys-89, Tyr-98 to Val-103, |
| | Asn-142 to Ser-156, Lys-162 to Glu-171, Ala-191 to Glu-231, Ala-237 to Tyr-247, |
| | Arg-254 to Thr-260, Tyr-267 to Ser-282. |
| 826144 | Preferred epitopes include those comprising a sequence shown in SEQ ID NO. 716 as |
| | residues: Ser-2 to Gly-7, Tyr-18 to Phe-26, Lys-39 to Gly-57, Gly-100 to Pro-106, |
| | Asn-109 to Ser-116, Tyr-119 to Ile-125, Pro-151 to Phe-157. |
| 826558 | Preferred epitopes include those comprising a sequence shown in SEQ ID NO. 717 as |
| | residues: Lys-4 to Ile-13, Arg-57 to His-62, Arg-68 to Gly-74. |
| 827471 | Preferred epitopes include those comprising a sequence shown in SEQ ID NO. 718 as |
| | residues: Lys-59 to Phe-69, Gln-98 to Thr-108, Pro-175 to Val-185, Asn-195 to Asp- |
| | 206, Glu-214 to Gly-222, Ser-233 to Arg-240, Thr-258 to Thr-263, Pro-267 to Glu- |
| | 272, Pro-278 to Glu-283, Pro-289 to Gly-294, Pro-300 to Gly-305, Pro-311 to Glu- |
| | 316, Pro-322 to Gly-327, Pro-333 to Glu-338, Pro-344 to Ala-351. |
| 827716 | Preferred epitopes include those comprising a sequence shown in SEQ ID NO. 719 as |
| | residues: Lys-30 to Thr-37, Tyr-42 to Gly-54, Arg-93 to Thr-107, Pro-109 to Arg-116. |
| 827722 | Preferred epitopes include those comprising a sequence shown in SEQ ID NO. 720 as |
| | residues: Lys-1 to Lys-18. |
| 827727 | Preferred epitopes include those comprising a sequence shown in SEQ ID NO. 721 as |
| | residues: Lys-6 to Lys-24, Gln-50 to Glu-55, Arg-75 to Arg-90. |
| 828238 | Preferred epitopes include those comprising a sequence shown in SEQ ID NO. 722 as |
| | residues: Ser-78 to Trp-84, Pro-87 to Leu-94. |
| 828573 | Preferred epitopes include those comprising a sequence shown in SEQ ID NO. 723 as |
| | residues: Leu-9 to Thr-18, Leu-32 to Lys-37, Ser-45 to Leu-51, Val-80 to Glu-97, Pro- |
| | 101 to Asp-108, Ala-115 to Gly-124, Ser-133 to Tyr-144, Glu-158 to Ser-165. |
| 828848 | Preferred epitopes include those comprising a sequence shown in SEQ ID NO. 726 as |
| | residues: Leu-8 to Ser-15, Arg-50 to Val-55, Gln-82 to Asp-88, Leu-96 to Ile-103, |
| | Thr-136 to Trp-141. |
| 828929 | Preferred epitopes include those comprising a sequence shown in SEQ ID NO. 727 as |
| | residues: His-2 to Leu-11, Glu-27 to Met-34, Ala-57 to Ser-72, Asn-119 to Phe-126. |
| 829192 | Preferred epitopes include those comprising a sequence shown in SEQ ID NO. 730 as |
| | residues: Ala-16 to Trp-28, Pro-36 to Gln-42, Glu-45 to Trp-50, Arg-137 to Ser-142, |
| | Ser-148 to Leu-153, Ile-178 to Gly-183, Asp-235 to Tyr-243. |
| 829310 | Preferred epitopes include those comprising a sequence shown in SEQ ID NO. 731 as |
| | residues: Cys-4 to Cys-14, Gly-86 to Ser-97. |
| 829319 | Preferred epitopes include those comprising a sequence shown in SEQ ID NO. 732 as |
| | residues: Asp-49 to Glu-54. |
| 829459 | Preferred epitopes include those comprising a sequence shown in SEQ ID NO. 733 as |
| | residues: His-1 to Thr-9. |
| 829527 | Preferred epitopes include those comprising a sequence shown in SEQ ID NO. 734 as |
| | residues: Gly-1 to Arg-8. |
| 829736 | Preferred epitopes include those comprising a sequence shown in SEQ ID NO. 735 as |
| | residues: Ala-1 to Lys-11, Arg-21 to Ser-26, Ser-45 to Ser-55, Tyr-115 to Asp-120, |
| | Asp-131 to Ile-145, Gln-147 to Asp-152, Ser-224 to Ser-231, Lys-252 to Glu-263, Ser- |
| | 323 to Ser-332, His-341 to Asn-347. |
| 830552 | Preferred epitopes include those comprising a sequence shown in SEQ ID NO. 736 as |
| | residues: Phe-65 to Trp-73, Arg-87 to Gly-92, Gly-107 to Lys-112, Pro-177 to Thr- |
| | 186. |
| 830566 | Preferred epitopes include those comprising a sequence shown in SEQ ID NO. 737 as |
| | residues: Pro-8 to Lys-19. |
| 830569 | Preferred epitopes include those comprising a sequence shown in SEQ ID NO. 739 as |
| | residues: Ser-37 to Trp-42, Ser-56 to Asp-61, Thr-68 to Asn-74, Lys-107 to Pro-113, |
| | Trp-133 to Arg-138, Asp-211 to Val-216, Pro-255 to Glu-260, Ser-293 to Ser-298, |
| | Cys-312 to Lys-322, Ser-374 to Asn-380, Gly-389 to Ile-399, Ser-403 to Ser-409, Ser- |
| | 451 to Ser-462. |
| 830583 | Preferred epitopes include those comprising a sequence shown in SEQ ID NO. 740 as |
| | residues: Ala-5 to Gly-21, Gln-28 to Arg-37, Arg-67 to Ala-76, Glu-93 to Ala-100, |
| | Glu-117 to Arg-124, Lys-131 to Gly-145, Arg-152 to Met-160, Asp-176 to Glu-182, |
| | Asp-194 to Glu-203, Asp-231 to Glu-243, Lys-250 to Arg-257. |
| 830716 | Preferred epitopes include those comprising a sequence shown in SEQ ID NO. 744 as |
| | residues: Ala-5 to Arg-12, His-36 to Tyr-42, His-60 to Cys-75, Arg-87 to Gly-104, |
| | His-122 to Ser-140, Ser-163 to Pro-168, Thr-176 to Pro-181, Arg-195 to Pro-201. |
| 830792 | Preferred epitopes include those comprising a sequence shown in SEQ ID NO. 745 as |
| | residues: Cys-36 to Trp-43, Asn-113 to Ser-123, Pro-148 to Val-154, Glu-167 to Ser- |
| | 172. |
| 830893 | Preferred epitopes include those comprising a sequence shown in SEQ ID NO. 746 as |
| | residues: Pro-33 to Trp-38, Arg-40 to Glu-46, Val-53 to Glu-58, Leu-66 to Leu-81, |
| | Leu-93 to Gln-98, Ile-145 to Asp-152. |
| 831043 | Preferred epitopes include those comprising a sequence shown in SEQ ID NO. 748 as |
| | residues: Glu-5 to Tyr-12, Ser-27 to Tyr-35. |
| 831173 | Preferred epitopes include those comprising a sequence shown in SEQ ID NO. 751 as |
| | residues: Ser-9 to Ser-14, Leu-41 to Gly-53, Thr-64 to Asn-71, Glu-78 to Thr-84. |
| 831255 | Preferred epitopes include those comprising a sequence shown in SEQ ID NO. 752 as |
| | residues: Gln-10 to Gly-21, Pro-39 to Pro-45. |
| 831327 | Preferred epitopes include those comprising a sequence shown in SEQ ID NO. 753 as |
| | residues: Gln-29 to Ile-42, Pro-45 to Ser-53, Cys-72 to Ser-77, Glu-98 to Ser-104, |
| | Asp-112 to Ser-122, Lys-130 to Ser-136, Ser-152 to Cys-162. |
| 831493 | Preferred epitopes include those comprising a sequence shown in SEQ ID NO. 754 as |
| | residues: Cys-1 to Gly-6, Pro-8 to Gln-19, Ser-29 to Cys-36, Pro-43 to Glu-64, Glu-70 |
| | to Thr-85. |
| 831500 | Preferred epitopes include those comprising a sequence shown in SEQ ID NO. 755 as |
| | residues: Ser-13 to Ala-25, Ser-64 to Gly-78, Glu-81 to Gln-89. |
| 831502 | Preferred epitopes include those comprising a sequence shown in SEQ ID NO. 757 as |
| | residues: Pro-19 to Phe-26, Pro-29 to Gly-34, Pro-50 to Ser-55. |
| 831508 | Preferred epitopes include those comprising a sequence shown in SEQ ID NO. 758 as |
| | residues: Asp-7 to Ser-14, Ser-42 to Ser-57. |
| 831509 | Preferred epitopes include those comprising a sequence shown in SEQ ID NO. 759 as |
| | residues: Gly-7 to Leu-13. |
| 831520 | Preferred epitopes include those comprising a sequence shown in SEQ ID NO. 760 as |
| | residues: Ser-17 to Gly-25. |
| 831547 | Preferred epitopes include those comprising a sequence shown in SEQ ID NO. 761 as |
| | residues: Ser-4 to Arg-10, Thr-89 to Trp-98, Thr-118 to Cys-124. |
| 831847 | Preferred epitopes include those comprising a sequence shown in SEQ ID NO. 764 as |
| | residues: Leu-27 to Lys-43. |
| 831893 | Preferred epitopes include those comprising a sequence shown in SEQ ID NO. 765 as |
| | residues: Lys-1 to Ser-18, Ile-20 to Val-27, Asp-44 to Thr-60. |
| 831923 | Preferred epitopes include those comprising a sequence shown in SEQ ID NO. 768 as |
| | residues: Pro-25 to Ser-33, Gln-113 to Ser-122, Trp-147 to Tyr-158, Ser-187 to Ala- |
| | 198, His-201 to Gly-209, Pro-223 to Gly-228, Glu-233 to Gly-238. |
| 831959 | Preferred epitopes include those comprising a sequence shown in SEQ ID NO. 769 as |
| | residues: Tyr-46 to Gly-51. |
| 832008 | Preferred epitopes include those comprising a sequence shown in SEQ ID NO. 770 as |
| | residues: Ala-29 to Pro-48, Phe-79 to Thr-87, Glu-94 to Cys-101, Glu-111 to Asp-116. |
| 832110 | Preferred epitopes include those comprising a sequence shown in SEQ ID NO. 772 as |
| | residues: Val-2 to Leu-13, Ile-17 to Asn-22, Pro-49 to Ser-54, Ser-58 to Asp-74, Phe- |
| | 107 to Ser-113, Gln-149 to Ser-159, Pro-166 to Lys-183, Ser-223 to Lys-229, Arg-251 |
| | to Glu-267, Ala-269 to Arg-275. |
| 832146 | Preferred epitopes include those comprising a sequence shown in SEQ ID NO. 773 as |
| | residues: Lys-26 to Ala-37, Pro-46 to Asn-52, Glu-137 to Pro-147, Ser-171 to Ser- |
| | 185. |
| 832189 | Preferred epitopes include those comprising a sequence shown in SEQ ID NO. 774 as |
| | residues: Arg-20 to Asp-30, Pro-48 to Gly-53, Pro-67 to Gly-74. |
| 832393 | Preferred epitopes include those comprising a sequence shown in SEQ ID NO. 778 as |
| | residues: Gly-22 to Cys-29, Leu-52 to Phe-57, Phe-67 to Thr-73. |
| 832448 | Preferred epitopes include those comprising a sequence shown in SEQ ID NO. 781 as |
| | residues: Gly-2 to Arg-9, Leu-20 to Arg-28, Asp-33 to Arg-43, Lys-127 to Glu-132, |
| | His-146 to Pro-183. |
| 832532 | Preferred epitopes include those comprising a sequence shown in SEQ ID NO. 782 as |
| | residues: Val-4 to Ser-9, Lys-74 to Leu-79, Pro-95 to Lys-100, Asn-112 to Ile-117, |
| | Glu-129 to Ala-140, Asp-152 to Leu-158. |
| 832621 | Preferred epitopes include those comprising a sequence shown in SEQ ID NO. 783 as |
| | residues: Asp-17 to Glu-24, Glu-37 to Asn-44, Ile-53 to Gln-63, Glu-74 to Asp-82, |
| | Gln-91 to Lys-97, Leu-99 to Ile-104, Thr-114 to Ser-120. |
| 832622 | Preferred epitopes include those comprising a sequence shown in SEQ ID NO. 784 as |
| | residues: Leu-17 to Lys-36. |
| 835327 | Preferred epitopes include those comprising a sequence shown in SEQ ID NO. 785 as |
| | residues: Thr-40 to Gly-47. |
| 835695 | Preferred epitopes include those comprising a sequence shown in SEQ ID NO. 786 as |
| | residues: Gly-1 to Ile-11, Thr-23 to Ser-29. |
| 835857 | Preferred epitopes include those comprising a sequence shown in SEQ ID NO. 787 as |
| | residues: Leu-42 to Ser-54, Asp-82 to Ala-91, Lys-103 to Leu-111, Lys-117 to Asn- |
| | 123, Glu-160 to Gln-165, Glu-183 to Val-192, Leu-225 to Lys-231, Lys-247 to Thr- |
| | 255, Lys-279 to Asn-293, Leu-295 to Asn-303, Val-305 to Asn-317, Ile-360 to Cys- |
| | 370, Leu-373 to Ala-385, Gln-413 to Ala-435, Pro-465 to Thr-489, Pro-491 to Gly- |
| | 502, Pro-526 to Glu-534, Gln-550 to Val-559. |
| 836183 | Preferred epitopes include those comprising a sequence shown in SEQ ID NO. 788 as |
| | residues: Arg-57 to Thr-62. |
| 836190 | Preferred epitopes include those comprising a sequence shown in SEQ ID NO. 789 as |
| | residues: Val-34 to Ser-40. |
| 836196 | Preferred epitopes include those comprising a sequence shown in SEQ ID NO. 790 as |
| | residues: Arg-51 to Leu-57, Leu-61 to Ser-70, Ser-77 to Ser-84. |
| 836253 | Preferred epitopes include those comprising a sequence shown in SEQ ID NO. 791 as |
| | residues: Ser-1 to Thr-11. |
| 836372 | Preferred epitopes include those comprising a sequence shown in SEQ ID NO. 792 as |
| | residues: Gly-13 to Ser-30, Thr-38 to Trp-44, Ser-60 to Tyr-66, Asp-92 to Gln-99. |
| 837445 | Preferred epitopes include those comprising a sequence shown in SEQ ID NO. 794 as |
| | residues: Asn-1 to Gln-9, Lys-22 to Met-28, Gln-66 to Ser-73, Gln-76 to Gly-87, Ser- |
| | 92 to Asp-99. |
| 837620 | Preferred epitopes include those comprising a sequence shown in SEQ ID NO. 795 as |
| | residues: Gln-11 to Gly-18, Ser-39 to Gln-44. |
| 837995 | Preferred epitopes include those comprising a sequence shown in SEQ ID NO. 797 as |
| | residues: Ser-44 to Ser-53, Thr-66 to Ser-71. |
| 838237 | Preferred epitopes include those comprising a sequence shown in SEQ ID NO. 799 as |
| | residues: Glu-62 to Asp-67, Gly-79 to Gly-85. |
| 838700 | Preferred epitopes include those comprising a sequence shown in SEQ ID NO. 800 as |
| | residues: Ser-88 to Lys-109, Lys-132 to Ile-137, Thr-158 to Asn-165, Asp-175 to Arg- |
| | 191, Leu-199 to Gln-206, Leu-217 to Asp-222, Ser-229 to Ile-235, Gln-266 to Asn- |
| | 271, Thr-293 to Gly-301, Tyr-321 to Asn-327, Phe-340 to Gln-348, Glu-415 to Asp- |
| | 422, Gly-432 to Ser-439, Pro-443 to Arg-455, Asn-463 to Ser-470, Ser-478 to Cys- |
| | 497, Ala-505 to Glu-552, Lys-558 to Lys-581. |
| 839096 | Preferred epitopes include those comprising a sequence shown in SEQ ID NO. 802 as |
| | residues: Arg-1 to Ser-17. |
| 839588 | Preferred epitopes include those comprising a sequence shown in SEQ ID NO. 804 as |
| | residues: Arg-41 to Glu-48. |
| 839589 | Preferred epitopes include those comprising a sequence shown in SEQ ID NO. 805 as |
| | residues: Arg-6 to His-13, Pro-69 to Glu-76. |
| 839733 | Preferred epitopes include those comprising a sequence shown in SEQ ID NO. 806 as |
| | residues: His-25 to His-31, Ser-61 to Gly-67, Pro-73 to Ala-80, Glu-123 to Ser-128, |
| | Glu-141 to Arg-149, Leu-162 to Gly-176, Ser-197 to Gly-204, Arg-222 to Asn-232, |
| | Gln-234 to Trp-242, Thr-250 to Val-257, Val-261 to Ala-271, Asp-301 to Thr-312, |
| | Pro-346 to Leu-352, Pro-355 to Cys-371, Ala-382 to Gly-394, Leu-435 to Asp-441, |
| | Pro-455 to Leu-460. |
| 839874 | Preferred epitopes include those comprising a sequence shown in SEQ ID NO. 807 as |
| | residues: Arg-98 to Thr-104, Gln-117 to Lys-122, Tyr-250 to Leu-262, Glu-296 to |
| | Lys-301. |
| 840017 | Preferred epitopes include those comprising a sequence shown in SEQ ID NO. 808 as |
| | residues: Ile-1 to Asp-6, Ser-42 to Asp-54, Ser-157 to Asn-166, Gly-188 to Ile-193, |
| | Glu-203 to Asp-208, Thr-236 to Lys-249, His-272 to Gln-278, Asn-364 to Glu-373, |
| | Ser-383 to Arg-388, Pro-391 to Ile-399, Gln-404 to Gly-412, Lys-420 to His-431. |
| 840124 | Preferred epitopes include those comprising a sequence shown in SEQ ID NO. 809 as |
| | residues: Gln-1 to Gly-8, Pro-17 to Trp-22. |
| 840617 | Preferred epitopes include those comprising a sequence shown in SEQ ID NO. 811 as |
| | residues: Thr-1 to Arg-6, Leu-22 to Glu-30, Lys-47 to Phe-61, Pro-131 to Asp-136, |
| | Arg-156 to Thr-161, Gln-181 to Trp-189, Glu-225 to Asp-234, Pro-251 to Thr-258, |
| | Ala-273 to Ser-278, Thr-285 to Arg-320, Pro-372 to Tyr-378, Val-380 to Ser-386, |
| | Asp-453 to Asn-460. |
| 840792 | Preferred epitopes include those comprising a sequence shown in SEQ ID NO. 813 as |
| | residues: Ala-1 to Gly-7, Ile-17 to Gly-38, Asn-50 to Lys-58, Gln-61 to Gln-68, Ser- |
| | 80 to Val-86, Asp-182 to Ser-190. |
| 841325 | Preferred epitopes include those comprising a sequence shown in SEQ ID NO. 816 as |
| | residues: Arg-28 to Glu-90, Phe-94 to Ser-104, Leu-123 to Lys-129, Lys-147 to Gly-152. |
| 841713 | Preferred epitopes include those comprising a sequence shown in SEQ ID NO. 817 as |
| | residues: Ser-36 to Arg-46, Thr-52 to Asp-64, Ser-69 to Gly-89, Ser-96 to Asp-102, |
| | Ile-106 to Phe-120, Val-136 to Thr-142, Gly-146 to Asp-169, Lys-176 to Phe-182, |
| | Asp-200 to Ser-206. |
| 842454 | Preferred epitopes include those comprising a sequence shown in SEQ ID NO. 820 as |
| | residues: Gly-41 to Gly-53, Gly-65 to Arg-77. |
| 842768 | Preferred epitopes include those comprising a sequence shown in SEQ ID NO. 821 as |
| | residues: Thr-7 to Thr-13, Arg-49 to Gln-55. |
| 842999 | Preferred epitopes include those comprising a sequence shown in SEQ ID NO. 822 as |
| | residues: Leu-25 to Glu-32. |
| 843830 | Preferred epitopes include those comprising a sequence shown in SEQ ID NO. 823 as |
| | residues: Asp-24 to Asp-31, Gly-37 to Thr-47, Gly-55 to Ala-60, Gly-91 to Asn-107, |
| | Glu-113 to Glu-120. |
| 844723 | Preferred epitopes include those comprising a sequence shown in SEQ ID NO. 824 as |
| | residues: Gly-1 to Gly-7, Gly-14 to Gly-20. |
| 844868 | Preferred epitopes include those comprising a sequence shown in SEQ ID NO. 825 as |
| | residues: Pro-19 to Gly-40, Lys-54 to Ala-60, Lys-69 to Asn-74, Asn-80 to Pro-94. |
| 845373 | Preferred epitopes include those comprising a sequence shown in SEQ ID NO. 827 as |
| | residues: Tyr-3 to Gly-11, Arg-68 to Trp-76, Pro-82 to Ile-91, Asn-138 to Ala-144, |
| | Arg-169 to Lys-175, Ser-180 to Glu-192, Ile-421 to Ser-427. |
| 845412 | Preferred epitopes include those comprising a sequence shown in SEQ ID NO. 828 as |
| | residues: Cys-24 to Gly-35, Ala-42 to Glu-47, Gln-181 to Asp-188, Pro-277 to His-292. |
| HISED43R | Preferred epitopes include those comprising a sequence shown in SEQ ID NO. 829 as |
| | residues: Lys-1 to Trp-6, Gln-9 to Gln-16, Gly-66 to Val-71, Lys-74 to Trp-82. |
| HOSEQ76R | Preferred epitopes include those comprising a sequence shown in SEQ ID NO. 830 as |
| | residues: Ser-36 to Gly-48. |
| HISDS43R | Preferred epitopes include those comprising a sequence shown in SEQ ID NO. 831 as |
| | residues: Ser-28 to Arg-36. |
| HPJDY28R | Preferred epitopes include those comprising a sequence shown in SEQ ID NO. 832 as |
| | residues: Cys-9 to His-14. |
| HISDW59R | Preferred epitopes include those comprising a sequence shown in SEQ ID NO. 837 as |
| | residues: Ile-4 to Val-9. |
| HTPGD92R | Preferred epitopes include those comprising a sequence shown in SEQ ID NO. 839 as |
| | residues: Ser-9 to Pro-14. |
| HHFLB69R | Preferred epitopes include those comprising a sequence shown in SEQ ID NO. 840 as |
| | residues: Pro-1 to Gly-6, Pro-20 to Arg-25, Ala-45 to Ser-50. |
| HPDEH50R | Preferred epitopes include those comprising a sequence shown in SEQ ID NO. 841 as |
| | residues: Ser-24 to Ser-29. |
| HMTMA16R | Preferred epitopes include those comprising a sequence shown in SEQ ID NO. 842 as |
| | residues: Cys-4 to Gly-11, Ile-59 to Gln-64, Asn-85 to Lys-90, Glu-94 to Lys-99. |
| HTPGL88R | Preferred epitopes include those comprising a sequence shown in SEQ ID NO. 844 as |
| | residues: Ala-30 to Gly-42, Leu-44 to Lys-50, Gln-60 to Asp-68, Gln-78 to Ser-84. |
| HMCIA86R | Preferred epitopes include those comprising a sequence shown in SEQ ID NO. 845 as |
| | residues: Gly-39 to Ser-45, Arg-52 to Arg-58. |
| HDTFE89R | Preferred epitopes include those comprising a sequence shown in SEQ ID NO. 847 as |
| | residues: Glu-25 to Gln-32. |
| HTLHH34R | Preferred epitopes include those comprising a sequence shown in SEQ ID NO. 850 as |
| | residues: Phe-11 to Ser-22, Ser-79 to Lys-86, His-97 to Asp-102. |
| HCCMA63R | Preferred epitopes include those comprising a sequence shown in SEQ ID NO. 855 as |
| | residues: Gly-1 to Gly-13. |
| HE8EZ78R | Preferred epitopes include those comprising a sequence shown in SEQ ID NO. 856 as |
| | residues: Ala-1 to Leu-7, Ile-14 to Gln-22, Glu-39 to Asp-44, Leu-76 to Val-84, Asn- |
| | 89 to Leu-95, Pro-98 to Glu-103. |
| HALSD82R | Preferred epitopes include those comprising a sequence shown in SEQ ID NO. 858 as |
| | residues: Asn-1 to Asp-6, Thr-19 to Cys-31, Glu-33 to Trp-39, Gly-56 to Asp-69, |
| | Met-84 to His-106, Lys-112 to His-118. |
| H2LAS44R | Preferred epitopes include those comprising a sequence shown in SEQ ID NO. 859 as |
| | residues: His-10 to Gln-18, Ser-79 to Gly-89. |
| HTXPA42R | Preferred epitopes include those comprising a sequence shown in SEQ ID NO. 860 as |
| | residues: Arg-1 to Lys-6, Asn-31 to Lys-39. |
| HAHEJ39R | Preferred epitopes include those comprising a sequence shown in SEQ ID NO. 862 as |
| | residues: Asp-8 to Gly-14, Gly-19 to Ser-29, Arg-67 to Gly-72. |
| HOEMQ04R | Preferred epitopes include those comprising a sequence shown in SEQ ID NO. 863 as |
| | residues: Lys-12 to Arg-21, Tyr-57 to Pro-71. |
| HOENU56R | Preferred epitopes include those comprising a sequence shown in SEQ ID NO. 865 as |
| | residues: Leu-9 to Leu-15. |
| HAGGB37R | Preferred epitopes include those comprising a sequence shown in SEQ ID NO. 866 as |
| | residues: Asn-32 to His-38. |
| HAHDO57R | Preferred epitopes include those comprising a sequence shown in SEQ ID NO. 868 as |
| | residues: Gly-1 to Gly-7, Gly-17 to Ser-28. |
| HTPCT95R | Preferred epitopes include those comprising a sequence shown in SEQ ID NO. 871 as |
| | residues: Glu-33 to Trp-40, Tyr-48 to His-56. |
| HCCMD33R | Preferred epitopes include those comprising a sequence shown in SEQ ID NO. 873 as |
| | residues: Glu-9 to Gly-14, Cys-33 to Lys-44. |
| HCE4L96R | Preferred epitopes include those comprising a sequence shown in SEQ ID NO. 875 as |
| | residues: Gln-1 to Arg-8, Arg-13 to Ser-30, His-38 to Tyr-44. |
| HTPGL86R | Preferred epitopes include those comprising a sequence shown in SEQ ID NO. 876 as |
| | residues: Gln-47 to Cys-53, Asn-66 to Cys-71. |
| HWDAK95R | Preferred epitopes include those comprising a sequence shown in SEQ ID NO. 878 as |
| | residues: His-17 to Gln-26, Met-28 to His-39, Pro-48 to Gly-58. |
| HE9DG72R | Preferred epitopes include those comprising a sequence shown in SEQ ID NO. 879 as |
| | residues: Val-29 to Lys-34, Thr-50 to Gly-56. |
| HDPOY89R | Preferred epitopes include those comprising a sequence shown in SEQ ID NO. 880 as |
| | residues: Gln-1 to Met-11, Pro-26 to Ser-37, Pro-55 to His-60, Lys-83 to Thr-99. |
| HAHEJ13R | Preferred epitopes include those comprising a sequence shown in SEQ ID NO. 881 as |
| | residues: Glu-12 to Ser-17. |
| HCFCM83R | Preferred epitopes include those comprising a sequence shown in SEQ ID NO. 883 as |
| | residues: Glu-19 to Ala-26. |
| HBMBJ92R | Preferred epitopes include those comprising a sequence shown in SEQ ID NO. 891 as |
| | residues: Leu-22 to Gly-27, Glu-33 to Val-38. |
| HCGBC37R | Preferred epitopes include those comprising a sequence shown in SEQ ID NO. 892 as |
| | residues: Phe-26 to Val-31, Pro-35 to Arg-42. |
| HCROI22R | Preferred epitopes include those comprising a sequence shown in SEQ ID NO. 893 as |
| | residues: Pro-5 to Ser-14, Ser-25 to Leu-30. |
| HDTLK21R | Preferred epitopes include those comprising a sequence shown in SEQ ID NO. 894 as |
| | residues: Pro-11 to Asn-17. |
| HEGAD29R | Preferred epitopes include those comprising a sequence shown in SEQ ID NO. 898 as |
| | residues: Glu-1 to His-6, Gly-19 to Trp-31. |
| HFKHC10R | Preferred epitopes include those comprising a sequence shown in SEQ ID NO. 899 as |
| | residues: Val-12 to Asn-18, Lys-30 to Glu-38. |
| HNHGQ70R | Preferred epitopes include those comprising a sequence shown in SEQ ID NO. 909 as |
| | residues: Pro-6 to Ala-16, Ala-61 to Met-68, Pro-72 to Ala-77, Ser-88 to His-93, Thr- |
| | 113 to Ser-118. |
| HOSMV19R | Preferred epitopes include those comprising a sequence shown in SEQ ID NO. 910 as |
| | residues: Pro-12 to Leu-18. |
| HULEB88R | Preferred epitopes include those comprising a sequence shown in SEQ ID NO. 913 as |
| | residues: Glu-11 to Leu-17, Leu-36 to Thr-41. |
| HWLWG58R | Preferred epitopes include those comprising a sequence shown in SEQ ID NO. 917 as |
| | residues: Glu-1 to Cys-6. |
| HAIDL46R | Preferred epitopes include those comprising a sequence shown in SEQ ID NO. 918 as |
| | residues: His-1 to Asp-55, Asp-57 to His-74. |

[0108] The present invention encompasses polypeptides comprising, or alternatively consisting of, an epitope of the polypeptide sequence shown in SEQ ID NO:Y, or an epitope of the polypeptide sequence encoded by the cDNA in the related cDNA clone contained in a deposited library or encoded by a polynucleotide that hybridizes to the complement of an epitope encoding sequence of SEQ ID NO:X, or an epitope encoding sequence contained in the deposited cDNA clone under stringent hybridization conditions, or alternatively, under lower stringency hybridization conditions, as defined supra. The present invention further encompasses polynucleotide sequences encoding an epitope of a polypeptide sequence of the invention (such as, for example, the sequence disclosed in SEQ ID NO:X), polynucleotide sequences of the complementary strand of a polynucleotide sequence encoding an epitope of the invention, and polynucleotide sequences which hybridize to this complementary strand under stringent hybridization conditions or alternatively, under lower stringency hybridization conditions, as defined supra.

[0109] The term “epitopes,” as used herein, refers to portions of a polypeptide having antigenic or immunogenic activity in an animal, preferably a mammal, and most preferably in a human. In a preferred embodiment, the present invention encompasses a polypeptide comprising an epitope, as well as the polynucleotide encoding this polypeptide. An “immunogenic epitope,” as used herein, is defined as a portion of a protein that elicits an antibody response in an animal, as determined by any method known in the art, for example, by the methods for generating antibodies described infra. (See, for example, Geysen et al., Proc. Natl. Acad. Sci. USA 81:3998-4002 (1983)). The term “antigenic epitope,” as used herein, is defined as a portion of a protein to which an antibody can immunospecifically bind its antigen as determined by any method well known in the art, for example, by the immunoassays described herein. Immunospecific binding excludes non-specific binding but does not necessarily exclude cross-reactivity with other antigens. Antigenic epitopes need not necessarily be immunogenic.

[0110] Fragments which function as epitopes may be produced by any conventional means. (See, e.g., Houghten, R. A., Proc. Natl. Acad. Sci. USA 82:5131-5135 (1985) further described in U.S. Pat. No. 4,631,211.)

[0111] In the present invention, antigenic epitopes preferably contain a sequence of at least 4, at least 5, at least 6, at least 7, more preferably at least 8, at least 9, at least 10, at least 11, at least 12, at least 13, at least 14, at least 15, at least 20, at least 25, at least 30, at least 40, at least 50, and, most preferably, between about 15 to about 30 amino acids. Preferred polypeptides comprising immunogenic or antigenic epitopes are at least 10, 15, 20, 25, 30, 35, 40, 45, 50, 55, 60, 65, 70, 75, 80, 85, 90, 95, or 100 amino acid residues in length. Additional non-exclusive preferred antigenic epitopes include the antigenic epitopes disclosed herein, as well as portions thereof. Antigenic epitopes are useful, for example, to raise antibodies, including monoclonal antibodies, that specifically bind the epitope. Preferred antigenic epitopes include the antigenic epitopes disclosed herein, as well as any combination of two, three, four, five or more of these antigenic epitopes. Antigenic epitopes can be used as the target molecules in immunoassays. (See, for instance, Wilson et al., Cell 37:767-778 (1984); Sutcliffe et al., Science 219:660-666 (1983)).

[0112] Similarly, immunogenic epitopes can be used, for example, to induce antibodies according to methods well known in the art. (See, for instance, Sutcliffe et al., supra; Wilson et al., supra; Chow et al., Proc. Natl. Acad. Sci. USA 82:910-914; and Bittle et al., J. Gen. Virol. 66:2347-2354 (1985). Preferred immunogenic epitopes include the immunogenic epitopes disclosed herein, as well as any combination of two, three, four, five or more of these immunogenic epitopes. The polypeptides comprising one or more immunogenic epitopes may be presented for eliciting an antibody response together with a carrier protein, such as an albumin, to an animal system (such as rabbit or mouse), or, if the polypeptide is of sufficient length (at least about 25 amino acids), the polypeptide may be presented without a carrier. However, immunogenic epitopes comprising as few as 8 to 10 amino acids have been shown to be sufficient to raise antibodies capable of binding to, at the very least, linear epitopes in a denatured polypeptide (e.g., in Western blotting).

[0113] Epitope-bearing polypeptides of the present invention may be used to induce antibodies according to methods well known in the art including, but not limited to, in vivo immunization, in vitro immunization, and phage display methods. See, e.g., Sutcliffe et al., supra; Wilson et al., supra, and Bittle et al., J. Gen. Virol., 66:2347-2354 (1985). If in vivo immunization is used, animals may be immunized with free peptide; however, anti-peptide antibody titer may be boosted by coupling the peptide to a macromolecular carrier, such as keyhole limpet hemacyanin (KLH) or tetanus toxoid. For instance, peptides containing cysteine residues may be coupled to a carrier using a linker such as maleimidobenzoyl-N-hydroxysuccinimide ester (MBS), while other peptides may be coupled to carriers using a more general linking agent such as glutaraldehyde. Animals such as rabbits, rats and mice are immunized with either free or carrier-coupled peptides, for instance, by intraperitoneal and/or intradermal injection of emulsions containing about 100 μg of peptide or carrier protein and Freund's adjuvant or any other adjuvant known for stimulating an immune response. Several booster injections may be needed, for instance, at intervals of about two weeks, to provide a useful titer of anti-peptide antibody which can be detected, for example, by ELISA assay using free peptide adsorbed to a solid surface. The titer of anti-peptide antibodies in serum from an immunized animal may be increased by selection of anti-peptide antibodies, for instance, by adsorption to the peptide on a solid support and elution of the selected antibodies according to methods well known in the art.

[0114] As one of skill in the art will appreciate, and as discussed above, the polypeptides of the present invention, and immunogenic and/or antigenic epitope fragments thereof can be fused to other polypeptide sequences. For example, the polypeptides of the present invention may be fused with the constant domain of immunoglobulins (IgA, IgE, IgG, IgM), or portions thereof (CH1, CH2, CH3, or any combination thereof and portions thereof) resulting in chimeric polypeptides. Such fusion proteins may facilitate purification and may increase half-life in vivo. This has been shown for chimeric proteins consisting of the first two domains of the human CD4-polypeptide and various domains of the constant regions of the heavy or light chains of mammalian immunoglobulins. See, e.g., EP 394,827; Traunecker et al., Nature, 331:84-86 (1988). Enhanced delivery of an antigen across the epithelial barrier to the immune system has been demonstrated for antigens (e.g., insulin) conjugated to an FcRn binding partner such as IgG or Fc fragments (see, e.g., PCT Publications WO 96/22024 and WO 99/04813). IgG Fusion proteins that have a disulfide-linked dimeric structure due to the IgG portion desulfide bonds have also been found to be more efficient in binding and neutralizing other molecules than monomeric polypeptides or fragments thereof alone. See, e.g., Fountoulakis et al., J. Biochem., 270:3958-3964 (1995).

[0115] Similarly, EP-A-O 464 533 (Canadian counterpart 2045869) discloses fusion proteins comprising various portions of constant region of immunoglobulin molecules together with another human protein or part thereof. In many cases, the Fc part in a fusion protein is beneficial in therapy and diagnosis, and thus can result in, for example, improved pharmacokinetic properties. (EP-A 0232 262.) Alternatively, deleting the Fc part after the fusion protein has been expressed, detected, and purified, may be desired. For example, the Fc portion may hinder therapy and diagnosis if the fusion protein is used as an antigen for immunizations. In drug discovery, for example, human proteins, such as hIL-5, have been fused with Fc portions for the purpose of high-throughput screening assays to identify antagonists of hIL-5. (See, D. Bennett et al., J. Molecular Recognition 8:52-58 (1995); K. Johanson et al., J. Biol. Chem. 270:9459-9471 (1995).)

[0116] Moreover, the polypeptides of the present invention can be fused to marker sequences, such as a peptide which facilitates purification of the fused polypeptide. In preferred embodiments, the marker amino acid sequence is a hexa-histidine peptide, such as the tag provided in a pQE vector (QIAGEN, Inc., 9259 Eton Avenue, Chatsworth, Calif., 91311), among others, many of which are commercially available. As described in Gentz et al., Proc. Natl. Acad. Sci. USA 86:821-824 (1989), for instance, hexa-histidine provides for convenient purification of the fusion protein. Another peptide tag useful for purification, the “HA” tag, corresponds to an epitope derived from the influenza hemagglutinin protein. (Wilson et al., Cell 37:767 (1984).)

[0117] Thus, any of these above fusions can be engineered using the polynucleotides or the polypeptides of the present invention.

[0118] Nucleic acids encoding the above epitopes can also be recombined with a gene of interest as an epitope tag (e.g., the hemagglutinin (“HA”) tag or flag tag) to aid in detection and purification of the expressed polypeptide. For example, a system described by Janknecht et al. allows for the ready purification of non-denatured fusion proteins expressed in human cell lines (Janknecht et al., Proc. Natl. Acad. Sci. USA 88:8972-897 (1991)). In this system, the gene of interest is subcloned into a vaccinia recombination plasmid such that the open reading frame of the gene is translationally fused to an amino-terminal tag consisting of six histidine residues. The tag serves as a matrix binding domain for the fusion protein. Extracts from cells infected with the recombinant vaccinia virus are loaded onto Ni2+ nitriloacetic acid-agarose column and histidine-tagged proteins can be selectively eluted with imidazole-containing buffers.

[0119] Additional fusion proteins of the invention may be generated through the techniques of gene-shuffling, motif-shuffling, exon-shuffling, and/or codon-shuffling (collectively referred to as “DNA shuffling”). DNA shuffling may be employed to modulate the activities of polypeptides of the invention, such methods can be used to generate polypeptides with altered activity, as well as agonists and antagonists of the polypeptides. See, generally, U.S. Pat. Nos. 5,605,793; 5,811,238; 5,830,721; 5,834,252; and 5,837,458, and Patten et al., Curr. Opinion Biotechnol. 8:724-33 (1997); Harayama, Trends Biotechnol. 16(2):76-82 (1998); Hansson, et al., J. Mol. Biol. 287:265-76 (1999); and Lorenzo and Blasco, Biotechniques 24(2):308-13 (1998) (each of these patents and publications are hereby incorporated by reference in its entirety). In one embodiment, alteration of polynucleotides corresponding to SEQ ID NO:X and the polypeptides encoded by these polynucleotides may be achieved by DNA shuffling. DNA shuffling involves the assembly of two or more DNA segments by homologous or site-specific recombination to generate variation in the polynucleotide sequence. In another embodiment, polynucleotides of the invention, or the encoded polypeptides, may be altered by being subjected to random mutagenesis by error-prone PCR, random nucleotide insertion or other methods prior to recombination. In another embodiment, one or more components, motifs, sections, parts, domains, fragments, etc., of a polynucleotide encoding a polypeptide of the invention may be recombined with one or more components, motifs, sections, parts, domains, fragments, etc. of one or more heterologous molecules.

[0120] As discussed herein, any polypeptide of the present invention can be used to generate fusion proteins. For example, the polypeptide of the present invention, when fused to a second protein, can be used as an antigenic tag. Antibodies raised against the polypeptide of the present invention can be used to indirectly detect the second protein by binding to the polypeptide. Moreover, because secreted proteins target cellular locations based on trafficking signals, polypeptides of the present invention which are shown to be secreted can be used as targeting molecules once fused to other proteins.

[0121] Examples of domains that can be fused to polypeptides of the present invention include not only heterologous signal sequences, but also other heterologous functional regions. The fusion does not necessarily need to be direct, but may occur through linker sequences.

[0122] In certain preferred embodiments, proteins of the invention comprise fusion proteins wherein the polypeptides are N and/or C-terminal deletion mutants. In preferred embodiments, the application is directed to nucleic acid molecules at least 80%, 85%, 90%, 95%, 96%, 97%, 98% or 99% identical to the nucleic acid sequences encoding polypeptides having the amino acid sequence of the specific N- and C-terminal deletions mutants. Polynucleotides encoding these polypeptides are also encompassed by the invention.

[0123] Moreover, fusion proteins may also be engineered to improve characteristics of the polypeptide of the present invention. For instance, a region of additional amino acids, particularly charged amino acids, may be added to the N-terminus of the polypeptide to improve stability and persistence during purification from the host cell or subsequent handling and storage. Also, peptide moieties may be added to the polypeptide to facilitate purification. Such regions may be removed prior to final preparation of the polypeptide. The addition of peptide moieties to facilitate handling of polypeptides are familiar and routine techniques in the art.

[0124] Vectors, Host Cells, and Protein Production

[0125] The present invention also relates to vectors containing the polynucleotide of the present invention, host cells, and the production of polypeptides by recombinant techniques. The vector may be, for example, a phage, plasmid, viral, or retroviral vector. Retroviral vectors may be replication competent or replication defective. In the latter case, viral propagation generally will occur only in complementing host cells.

[0126] The polynucleotides of the invention may be joined to a vector containing a selectable marker for propagation in a host. Generally, a plasmid vector is introduced in a precipitate, such as a calcium phosphate precipitate, or in a complex with a charged lipid. If the vector is a virus, it may be packaged in vitro using an appropriate packaging cell line and then transduced into host cells.

[0127] The polynucleotide insert should be operatively linked to an appropriate promoter, such as the phage lambda PL promoter, the E. coli lac, trp, phoA and tac promoters, the SV40 early and late promoters and promoters of retroviral LTRs, to name a few. Other suitable promoters will be known to the skilled artisan. The expression constructs will further contain sites for transcription initiation, termination, and, in the transcribed region, a ribosome binding site for translation. The coding portion of the transcripts expressed by the constructs will preferably include a translation initiating codon at the beginning and a termination codon (UAA, UGA or UAG) appropriately positioned at the end of the polypeptide to be translated.

[0128] As indicated, the expression vectors will preferably include at least one selectable marker. Such markers include dihydrofolate reductase, G418 or neomycin resistance for eukaryotic cell culture and tetracycline, kanamycin or ampicillin resistance genes for culturing in E. coli and other bacteria. Representative examples of appropriate hosts include, but are not limited to, bacterial cells, such as E. coli, Streptomyces and Salmonella typhimurium cells; fungal cells, such as yeast cells (e.g., Saccharomyces cerevisiae or Pichia pastoris (ATCC Accession No. 201178)); insect cells such as Drosophila S2 and Spodoptera Sf9 cells; animal cells such as CHO, COS, 293, and Bowes melanoma cells; and plant cells. Appropriate culture mediums and conditions for the above-described host cells are known in the art.

[0129] Among vectors preferred for use in bacteria include pQE70, pQE60 and pQE-9, available from QIAGEN, Inc.; pBluescript vectors, Phagescript vectors, pNH8A, pNH16a, pNH18A, pNH46A, available from Stratagene Cloning Systems, Inc.; and ptrc99a, pKK223-3, pKK233-3, pDR540, pRIT5 available from Pharmacia Biotech, Inc. Among preferred eukaryotic vectors are pWLNEO, pSV2CAT, pOG44, pXT1 and pSG available from Stratagene; and pSVK3, pBPV, pMSG and pSVL available from Pharmacia. Preferred expression vectors for use in yeast systems include, but are not limited to pYES2, pYD1, pTEF1/Zeo, pYES2/GS, pPICZ, pGAPZ, pGAPZalph, pPIC9, pPIC3.5, pHIL-D2, pHIL-S1, pPIC3.5K, pPIC9K, and PAO815 (all available from Invitrogen, Carlbad, Calif.). Other suitable vectors will be readily apparent to the skilled artisan.

[0130] Introduction of the construct into the host cell can be effected by calcium phosphate transfection, DEAE-dextran mediated transfection, cationic lipid-mediated transfection, electroporation, transduction, infection, or other methods. Such methods are described in many standard laboratory manuals, such as Davis et al., Basic Methods In Molecular Biology (1986). It is specifically contemplated that the polypeptides of the present invention may in fact be expressed by a host cell lacking a recombinant vector.

[0131] A polypeptide of this invention can be recovered and purified from recombinant cell cultures by well-known methods including ammonium sulfate or ethanol precipitation, acid extraction, anion or cation exchange chromatography, phosphocellulose chromatography, hydrophobic interaction chromatography, affinity chromatography, hydroxylapatite chromatography and lectin chromatography. Most preferably, high performance liquid chromatography (“HPLC”) is employed for purification.

[0132] Polypeptides of the present invention can also be recovered from: products purified from natural sources, including bodily fluids, tissues and cells, whether directly isolated or cultured; products of chemical synthetic procedures; and products produced by recombinant techniques from a prokaryotic or eukaryotic host, including, for example, bacterial, yeast, higher plant, insect, and mammalian cells. Depending upon the host employed in a recombinant production procedure, the polypeptides of the present invention may be glycosylated or may be non-glycosylated. In addition, polypeptides of the invention may also include an initial modified methionine residue, in some cases as a result of host-mediated processes. Thus, it is well known in the art that the N-terminal methionine encoded by the translation initiation codon generally is removed with high efficiency from any protein after translation in all eukaryotic cells. While the N-terminal methionine on most proteins also is efficiently removed in most prokaryotes, for some proteins, this prokaryotic removal process is inefficient, depending on the nature of the amino acid to which the N-terminal methionine is covalently linked.

[0133] In one embodiment, the yeast Pichia pastoris is used to express polypeptides of the invention in a eukaryotic system. Pichia pastoris is a methylotrophic yeast which can metabolize methanol as its sole carbon source. A main step in the methanol metabolization pathway is the oxidation of methanol to formaldehyde using O₂. This reaction is catalyzed by the enzyme alcohol oxidase. In order to metabolize methanol as its sole carbon source, Pichia pastoris must generate high levels of alcohol oxidase due, in part, to the relatively low affinity of alcohol oxidase for O₂. Consequently, in a growth medium depending on methanol as a main carbon source, the promoter region of one of the two alcohol oxidase genes (AOX1) is highly active. In the presence of methanol, alcohol oxidase produced from the AOX1 gene comprises up to approximately 30% of the total soluble protein in Pichia pastoris. See, Ellis, S. B., et al., Mol. Cell. Biol. 5:1111-21 (1985); Koutz, P. J., et al., Yeast 5:167-77 (1989); Tschopp, J. F., et al., Nucl. Acids Res. 15:3859-76 (1987). Thus, a heterologous coding sequence, such as, for example, a polynucleotide of the present invention, under the transcriptional regulation of all or part of the AOX1 regulatory sequence is expressed at exceptionally high levels in Pichia yeast grown in the presence of methanol.

[0134] In one example, the plasmid vector pPIC9K is used to express DNA encoding a polypeptide of the invention, as set forth herein, in a Pichea yeast system essentially as described in “Pichia Protocols: Methods in Molecular Biology,” D. R. Higgins and J. Cregg, eds. The Humana Press, Totowa, N.J., 1998. This expression vector allows expression and secretion of a polypeptide of the invention by virtue of the strong AOX1 promoter linked to the Pichia pastoris alkaline phosphatase (PHO) secretory signal peptide (i.e., leader) located upstream of a multiple cloning site.

[0135] Many other yeast vectors could be used in place of pPIC9K, such as, pYES2, pYD1, pTEF1/Zeo, pYES2/GS, pPICZ, pGAPZ, pGAPZalpha, pPIC9, pPIC3.5, pHIL-D2, pHIL-S1, pPIC3.5K, and PAO815, as one skilled in the art would readily appreciate, as long as the proposed expression construct provides appropriately located signals for transcription, translation, secretion (if desired), and the like, including an in-frame AUG as required.

[0136] In another embodiment, high-level expression of a heterologous coding sequence, such as, for example, a polynucleotide of the present invention, may be achieved by cloning the heterologous polynucleotide of the invention into an expression vector such as, for example, pGAPZ or pGAPZalpha, and growing the yeast culture in the absence of methanol.

[0137] In addition to encompassing host cells containing the vector constructs discussed herein, the invention also encompasses primary, secondary, and immortalized host cells of vertebrate origin, particularly mammalian origin, that have been engineered to delete or replace endogenous genetic material (e.g., coding sequence), and/or to include genetic material (e.g., heterologous polynucleotide sequences) that is operably associated with polynucleotides of the invention, and which activates, alters, and/or amplifies endogenous polynucleotides. For example, techniques known in the art may be used to operably associate heterologous control regions (e.g., promoter and/or enhancer) and endogenous polynucleotide sequences via homologous recombination (see, e.g., U.S. Pat. No. 5,641,670, issued Jun. 24, 1997; International Publication No. WO 96/29411, published Sep. 26, 1996; International Publication No. WO 94/12650, published Aug. 4, 1994; Koller et al., Proc. Natl. Acad. Sci. USA 86:8932-8935 (1989); and Zijlstra et al., Nature 342:435-438 (1989), the disclosures of each of which are incorporated by reference in their entireties).

[0138] In addition, polypeptides of the invention can be chemically synthesized using techniques known in the art (e.g., see Creighton, 1983, Proteins: Structures and Molecular Principles, W.H. Freeman & Co., N.Y., and Hunkapiller et al., Nature, 310:105-111 (1984)). For example, a polypeptide corresponding to a fragment of a polypeptide can be synthesized by use of a peptide synthesizer. Furthermore, if desired, nonclassical amino acids or chemical amino acid analogs can be introduced as a substitution or addition into the polypeptide sequence. Non-classical amino acids include, but are not limited to, to the D-isomers of the common amino acids, 2,4-diaminobutyric acid, a-amino isobutyric acid, 4-aminobutyric acid, Abu, 2-amino butyric acid, g-Abu, e-Ahx, 6-amino hexanoic acid, Aib, 2-amino isobutyric acid, 3-amino propionic acid, ornithine, norleucine, norvaline, hydroxyproline, sarcosine, citrulline, homocitrulline, cysteic acid, t-butylglycine, t-butylalanine, phenylglycine, cyclohexylalanine, b-alanine, fluoro-amino acids, designer amino acids such as b-methyl amino acids, Ca-methyl amino acids, Na-methyl amino acids, and amino acid analogs in general. Furthermore, the amino acid can be D (dextrorotary) or L (levorotary).

[0139] Non-naturally occurring variants may be produced using art-known mutagenesis techniques, which include, but are not limited to oligonucleotide mediated mutagenesis, alanine scanning, PCR mutagenesis, site directed mutagenesis (see, e.g., Carter et al., Nucl. Acids Res. 13:4331 (1986); and Zoller et al., Nucl. Acids Res. 10:6487 (1982)), cassette mutagenesis (see, e.g., Wells et al., Gene 34:315 (1985)), restriction selection mutagenesis (see, e.g., Wells et al., Philos. Trans. R. Soc. London SerA 317:415 (1986)).

[0140] The invention additionally, encompasses polypeptides of the present invention which are differentially modified during or after translation, e.g., by glycosylation, acetylation, phosphorylation, amidation, derivatization by known protecting/blocking groups, proteolytic cleavage, linkage to an antibody molecule or other cellular ligand, etc. Any of numerous chemical modifications may be carried out by known techniques, including but not limited, to specific chemical cleavage by cyanogen bromide, trypsin, chymotrypsin, papain, V8 protease, NaBH₄; acetylation, formylation, oxidation, reduction; metabolic synthesis in the presence of tunicamycin; etc.

[0141] Additional post-translational modifications encompassed by the invention include, for example, e.g., N-linked or O-linked carbohydrate chains, processing of N-terminal or C-terminal ends), attachment of chemical moieties to the amino acid backbone, chemical modifications of N-linked or O-linked carbohydrate chains, and addition or deletion of an N-terminal methionine residue as a result of procaryotic host cell expression. The polypeptides may also be modified with a detectable label, such as an enzymatic, fluorescent, isotopic or affinity label to allow for detection and isolation of the protein.

[0142] Also provided by the invention are chemically modified derivatives of the polypeptides of the invention which may provide additional advantages such as increased solubility, stability and circulating time of the polypeptide, or decreased immunogenicity (see U.S. Pat. No. 4,179,337). The chemical moieties for derivatization may be selected from water soluble polymers such as polyethylene glycol, ethylene glycol/propylene glycol copolymers, carboxymethylcellulose, dextran, polyvinyl alcohol and the like. The polypeptides may be modified at random positions within the molecule, or at predetermined positions within the molecule and may include one, two, three or more attached chemical moieties.

[0143] The polymer may be of any molecular weight, and may be branched or unbranched. For polyethylene glycol, the preferred molecular weight is between about 1 kDa and about 100 kDa (the term “about” indicating that in preparations of polyethylene glycol, some molecules will weigh more, some less, than the stated molecular weight) for ease in handling and manufacturing. Other sizes may be used, depending on the desired therapeutic profile (e.g., the duration of sustained release desired, the effects, if any on biological activity, the ease in handling, the degree or lack of antigenicity and other known effects of the polyethylene glycol to a therapeutic protein or analog). For example, the polyethylene glycol may have an average molecular weight of about 200; 500; 1000; 1500; 2000; 2500; 3000; 3500; 4000; 4500; 5000; 5500; 6000; 6500; 7000; 7500; 8000; 8500; 9000; 9500; 10,000; 10,500; 11,000; 11,500; 12,000; 12,500; 13,000; 13,500; 14,000; 14,500; 15,000; 15,500; 16,000; 16,500; 17,000; 17,500; 18,000; 18,500; 19,000; 19,500; 20,000; 25,000; 30,000; 35,000; 40,000; 50,000; 55,000; 60,000; 65,000; 70,000; 75,000; 80,000; 85,000; 90,000; 95,000; or 100,000 kDa.

[0144] As noted above, the polyethylene glycol may have a branched structure. Branched polyethylene glycols are described, for example, in U.S. Pat. No. 5,643,575; Morpurgo et al., Appl. Biochem. Biotechnol. 56:59-72 (1996); Vorobjev et al., Nucleosides Nucleotides 18:2745-2750 (1999); and Caliceti et al., Bioconjug. Chem. 10:638-646 (1999), the disclosures of each of which are incorporated herein by reference.

[0145] The polyethylene glycol molecules (or other chemical moieties) should be attached to the protein with consideration of effects on functional or antigenic domains of the protein. There are a number of attachment methods available to those skilled in the art, e.g., EP 0 401 384, herein incorporated by reference (coupling PEG to G-CSF), see also Malik et al., Exp. Hematol. 20:1028-1035 (1992) (reporting pegylation of GM-CSF using tresyl chloride). For example, polyethylene glycol may be covalently bound through amino acid residues via a reactive group, such as, a free amino or carboxyl group. Reactive groups are those to which an activated polyethylene glycol molecule may be bound. The amino acid residues having a free amino group may include lysine residues and the N-terminal amino acid residues; those having a free carboxyl group may include aspartic acid residues glutamic acid residues and the C-terminal amino acid residue. Sulfhydryl groups may also be used as a reactive group for attaching the polyethylene glycol molecules. Preferred for therapeutic purposes is attachment at an amino group, such as attachment at the N-terminus or lysine group.

[0146] As suggested above, polyethylene glycol may be attached to proteins via linkage to any of a number of amino acid residues. For example, polyethylene glycol can be linked to a proteins via covalent bonds to lysine, histidine, aspartic acid, glutamic acid, or cysteine residues. One or more reaction chemistries may be employed to attach polyethylene glycol to specific amino acid residues (e.g., lysine, histidine, aspartic acid, glutamic acid, or cysteine) of the protein or to more than one type of amino acid residue (e.g., lysine, histidine, aspartic acid, glutamic acid, cysteine and combinations thereof) of the protein.

[0147] One may specifically desire proteins chemically modified at the N-terminus. Using polyethylene glycol as an illustration of the present composition, one may select from a variety of polyethylene glycol molecules (by molecular weight, branching, etc.), the proportion of polyethylene glycol molecules to protein (polypeptide) molecules in the reaction mix, the type of pegylation reaction to be performed, and the method of obtaining the selected N-terminally pegylated protein. The method of obtaining the N-terminally pegylated preparation (i.e., separating this moiety from other monopegylated moieties if necessary) may be by purification of the N-terminally pegylated material from a population of pegylated protein molecules. Selective proteins chemically modified at the N-terminus modification may be accomplished by reductive alkylation which exploits differential reactivity of different types of primary amino groups (lysine versus the N-terminal) available for derivatization in a particular protein. Under the appropriate reaction conditions, substantially selective derivatization of the protein at the N-terminus with a carbonyl group containing polymer is achieved.

[0148] As indicated above, pegylation of the proteins of the invention may be accomplished by any number of means. For example, polyethylene glycol may be attached to the protein either directly or by an intervening linker. Linkerless systems for attaching polyethylene glycol to proteins are described in Delgado et al., Crit. Rev. Thera. Drug Carrier Sys. 9:249-304 (1992); Francis et al., Intern. J. of Hematol. 68:1-18 (1998); U.S. Pat. Nos. 4,002,531; 5,349,052; WO 95/06058; and WO 98/32466, the disclosures of each of which are incorporated herein by reference.

[0149] One system for attaching polyethylene glycol directly to amino acid residues of proteins without an intervening linker employs tresylated MPEG, which is produced by the modification of monmethoxy polyethylene glycol (MPEG) using tresylchloride (ClSO₂CH₂CF₃). Upon reaction of protein with tresylated MPEG, polyethylene glycol is directly attached to amine groups of the protein. Thus, the invention includes protein-polyethylene glycol conjugates produced by reacting proteins of the invention with a polyethylene glycol molecule having a 2,2,2-trifluoreothane sulphonyl group.

[0150] Polyethylene glycol can also be attached to proteins using a number of different intervening linkers. For example, U.S. Pat. No. 5,612,460, the entire disclosure of which is incorporated herein by reference, discloses urethane linkers for connecting polyethylene glycol to proteins. Protein-polyethylene glycol conjugates wherein the polyethylene glycol is attached to the protein by a linker can also be produced by reaction of proteins with compounds such as MPEG-succinimidylsuccinate, MPEG activated with 1,1′-carbonyldiimidazole, MPEG-2,4,5-trichloropenylcarbonate, MPEG-p-nitrophenolcarbonate, and various MPEG-succinate derivatives. A number additional polyethylene glycol derivatives and reaction chemistries for attaching polyethylene glycol to proteins are described in WO 98/32466, the entire disclosure of which is incorporated herein by reference. Pegylated protein products produced using the reaction chemistries set out herein are included within the scope of the invention.

[0151] The number of polyethylene glycol moieties attached to each protein of the invention (i.e., the degree of substitution) may also vary. For example, the pegylated proteins of the invention may be linked, on average, to 1, 2, 3, 4, 5, 6, 7, 8, 9, 10, 12, 15, 17, 20, or more polyethylene glycol molecules. Similarly, the average degree of substitution within ranges such as 1-3, 2-4, 3-5, 4-6, 5-7, 6-8, 7-9, 8-10, 9-11, 10-12, 11, 13, 12-14, 13-15, 14-16, 15-17, 16-18, 17-19, or 18-20 polyethylene glycol moieties per protein molecule. Methods for determining the degree of substitution are discussed, for example, in Delgado et al., Crit. Rev. Thera. Drug Carrier Sys. 9:249-304 (1992).

[0152] The pancreatic cancer antigen polypeptides of the invention may be in monomers or multimers (i.e., dimers, trimers, tetramers and higher multimers). Accordingly, the present invention relates to monomers and multimers of the polypeptides of the invention, their preparation, and compositions (preferably, Therapeutics) containing them. In specific embodiments, the polypeptides of the invention are monomers, dimers, trimers or tetramers. In additional embodiments, the multimers of the invention are at least dimers, at least trimers, or at least tetramers.

[0153] Multimers encompassed by the invention may be homomers or heteromers. As used herein, the term homomer, refers to a multimer containing only polypeptides corresponding to the amino acid sequence of SEQ ID NO:Y or an amino acid sequence encoded by SEQ ID NO:X, and/or an amino acid sequence encoded by the cDNA in a related cDNA clone contained in a deposited library (including fragments, variants, splice variants, and fusion proteins, corresponding to any one of these as described herein). These homomers may contain polypeptides having identical or different amino acid sequences. In a specific embodiment, a homomer of the invention is a multimer containing only polypeptides having an identical amino acid sequence. In another specific embodiment, a homomer of the invention is a multimer containing polypeptides having different amino acid sequences. In specific embodiments, the multimer of the invention is a homodimer (e.g., containing polypeptides having identical or different amino acid sequences) or a homotrimer (e.g., containing polypeptides having identical and/or different amino acid sequences). In additional embodiments, the homomeric multimer of the invention is at least a homodimer, at least a homotrimer, or at least a homotetramer.

[0154] As used herein, the term heteromer refers to a multimer containing one or more heterologous polypeptides (i.e., polypeptides of different proteins) in addition to the polypeptides of the invention. In a specific embodiment, the multimer of the invention is a heterodimer, a heterotrimer, or a heterotetramer. In additional embodiments, the heteromeric multimer of the invention is at least a heterodimer, at least a heterotrimer, or at least a heterotetramer.

[0155] Multimers of the invention may be the result of hydrophobic, hydrophilic, ionic and/or covalent associations and/or may be indirectly linked, by for example, liposome formation. Thus, in one embodiment, multimers of the invention, such as, for example, homodimers or homotrimers, are formed when polypeptides of the invention contact one another in solution. In another embodiment, heteromultimers of the invention, such as, for example, heterotrimers or heterotetramers, are formed when polypeptides of the invention contact antibodies to the polypeptides of the invention (including antibodies to the heterologous polypeptide sequence in a fusion protein of the invention) in solution. In other embodiments, multimers of the invention are formed by covalent associations with and/or between the polypeptides of the invention. Such covalent associations may involve one or more amino acid residues contained in the polypeptide sequence (e.g., that recited in SEQ ID NO:Y, or contained in a polypeptide encoded by SEQ ID NO:X, and/or by the cDNA in the related cDNA clone contained in a deposited library). In one instance, the covalent associations are cross-linking between cysteine residues located within the polypeptide sequences which interact in the native (i.e., naturally occurring) polypeptide. In another instance, the covalent associations are the consequence of chemical or recombinant manipulation. Alternatively, such covalent associations may involve one or more amino acid residues contained in the heterologous polypeptide sequence in a fusion protein. In one example, covalent associations are between the heterologous sequence contained in a fusion protein of the invention (see, e.g., U.S. Pat. No. 5,478,925). In a specific example, the covalent associations are between the heterologous sequence contained in a Fc fusion protein of the invention (as described herein). In another specific example, covalent associations of fusion proteins of the invention are between heterologous polypeptide sequence from another protein that is capable of forming covalently associated multimers, such as for example, oseteoprotegerin (see, e.g., International Publication NO: WO 98/49305, the contents of which are herein incorporated by reference in its entirety). In another embodiment, two or more polypeptides of the invention are joined through peptide linkers. Examples include those peptide linkers described in U.S. Pat. No. 5,073,627 (hereby incorporated by reference). Proteins comprising multiple polypeptides of the invention separated by peptide linkers may be produced using conventional recombinant DNA technology.

[0156] Another method for preparing multimer polypeptides of the invention involves use of polypeptides of the invention fused to a leucine zipper or isoleucine zipper polypeptide sequence. Leucine zipper and isoleucine zipper domains are polypeptides that promote multimerization of the proteins in which they are found. Leucine zippers were originally identified in several DNA-binding proteins (Landschulz et al., Science 240:1759, (1988)), and have since been found in a variety of different proteins. Among the known leucine zippers are naturally occurring peptides and derivatives thereof that dimerize or trimerize. Examples of leucine zipper domains suitable for producing soluble multimeric proteins of the invention are those described in PCT application WO 94/10308, hereby incorporated by reference. Recombinant fusion proteins comprising a polypeptide of the invention fused to a polypeptide sequence that dimerizes or trimerizes in solution are expressed in suitable host cells, and the resulting soluble multimeric fusion protein is recovered from the culture supernatant using techniques known in the art.

[0157] Trimeric polypeptides of the invention may offer the advantage of enhanced biological activity. Preferred leucine zipper moieties and isoleucine moieties are those that preferentially form trimers. One example is a leucine zipper derived from lung surfactant protein D (SPD), as described in Hoppe et al. (FEBS Letters 344:191, (1994)) and in U.S. patent application Ser. No. 08/446,922, hereby incorporated by reference. Other peptides derived from naturally occurring trimeric proteins may be employed in preparing trimeric polypeptides of the invention.

[0158] In another example, proteins of the invention are associated by interactions between Flag® polypeptide sequence contained in fusion proteins of the invention containing Flag® polypeptide sequence. In a further embodiment, associations proteins of the invention are associated by interactions between heterologous polypeptide sequence contained in Flag® fusion proteins of the invention and anti-Flag® antibody.

[0159] The multimers of the invention may be generated using chemical techniques known in the art. For example, polypeptides desired to be contained in the multimers of the invention may be chemically cross-linked using linker molecules and linker molecule length optimization techniques known in the art (see, e.g., U.S. Pat. No. 5,478,925, which is herein incorporated by reference in its entirety). Additionally, multimers of the invention may be generated using techniques known in the art to form one or more inter-molecule cross-links between the cysteine residues located within the sequence of the polypeptides desired to be contained in the multimer (see, e.g., U.S. Pat. No. 5,478,925, which is herein incorporated by reference in its entirety). Further, polypeptides of the invention may be routinely modified by the addition of cysteine or biotin to the C-terminus or N-terminus of the polypeptide and techniques known in the art may be applied to generate multimers containing one or more of these modified polypeptides (see, e.g., U.S. Pat. No. 5,478,925, which is herein incorporated by reference in its entirety). Additionally, techniques known in the art may be applied to generate liposomes containing the polypeptide components desired to be contained in the multimer of the invention (see, e.g., U.S. Pat. No. 5,478,925, which is herein incorporated by reference in its entirety).

[0160] Alternatively, multimers of the invention may be generated using genetic engineering techniques known in the art. In one embodiment, polypeptides contained in multimers of the invention are produced recombinantly using fusion protein technology described herein or otherwise known in the art (see, e.g., U.S. Pat. No. 5,478,925, which is herein incorporated by reference in its entirety). In a specific embodiment, polynucleotides coding for a homodimer of the invention are generated by ligating a polynucleotide sequence encoding a polypeptide of the invention to a sequence encoding a linker polypeptide and then further to a synthetic polynucleotide encoding the translated product of the polypeptide in the reverse orientation from the original C-terminus to the N-terminus (lacking the leader sequence) (see, e.g., U.S. Pat. No. 5,478,925, which is herein incorporated by reference in its entirety). In another embodiment, recombinant techniques described herein or otherwise known in the art are applied to generate recombinant polypeptides of the invention which contain a transmembrane domain (or hyrophobic or signal peptide) and which can be incorporated by membrane reconstitution techniques into liposomes (see, e.g., U.S. Pat. No. 5,478,925, which is herein incorporated by reference in its entirety).

[0161] Antibodies

[0162] Further polypeptides of the invention relate to antibodies and T-cell antigen receptors (TCR) which immunospecifically bind a polypeptide, polypeptide fragment, or variant of SEQ ID NO:Y, and/or an epitope, of the present invention (as determined by immunoassays well known in the art for assaying specific antibody-antigen binding). Antibodies of the invention include, but are not limited to, polyclonal, monoclonal, multispecific, human, humanized or chimeric antibodies, single chain antibodies, Fab fragments, F(ab′) fragments, fragments produced by a Fab expression library, anti-idiotypic (anti-Id) antibodies (including, e.g., anti-Id antibodies to antibodies of the invention), and epitope-binding fragments of any of the above. The term “antibody,” as used herein, refers to immunoglobulin molecules and immunologically active portions of immunoglobulin molecules, i.e., molecules that contain an antigen binding site that immunospecifically binds an antigen. The immunoglobulin molecules of the invention can be of any type (e.g., IgG, IgE, IgM, IgD, IgA and IgY), class (e.g., IgG1, IgG2, IgG3, IgG4, IgA1 and IgA2) or subclass of immunoglobulin molecule.

[0163] Most preferably the antibodies are human antigen-binding antibody fragments of the present invention and include, but are not limited to, Fab, Fab′ and F(ab′)2, Fd, single-chain Fvs (scFv), single-chain antibodies, disulfide-linked Fvs (sdFv) and fragments comprising either a VL or VH domain. Antigen-binding antibody fragments, including single-chain antibodies, may comprise the variable region(s) alone or in combination with the entirety or a portion of the following: hinge region, CH1, CH2, and CH3 domains. Also included in the invention are antigen-binding fragments also comprising any combination of variable region(s) with a hinge region, CH1, CH2, and CH3 domains. The antibodies of the invention may be from any animal origin including birds and mammals. Preferably, the antibodies are human, murine (e.g., mouse and rat), donkey, ship rabbit, goat, guinea pig, camel, horse, or chicken. As used herein, “human” antibodies include antibodies having the amino acid sequence of a human immunoglobulin and include antibodies isolated from human immunoglobulin libraries or from animals transgenic for one or more human immunoglobulin and that do not express endogenous immunoglobulins, as described infra and, for example in, U.S. Pat. No. 5,939,598 by Kucherlapati et al.

[0164] The antibodies of the present invention may be monospecific, bispecific, trispecific or of greater multispecificity. Multispecific antibodies may be specific for different epitopes of a polypeptide of the present invention or may be specific for both a polypeptide of the present invention as well as for a heterologous epitope, such as a heterologous polypeptide or solid support material. See, e.g., PCT publications WO 93/17715; WO 92/08802; WO 91/00360; WO 92/05793; Tutt, et al., J. Immunol. 147:60-69 (1991); U.S. Pat. Nos. 4,474,893; 4,714,681; 4,925,648; 5,573,920; 5,601,819; Kostelny et al., J. Immunol. 148:1547-1553 (1992).

[0165] Antibodies of the present invention may be described or specified in terms of the epitope(s) or portion(s) of a polypeptide of the present invention which they recognize or specifically bind. The epitope(s) or polypeptide portion(s) may be specified as described herein, e.g., by N-terminal and C-terminal positions, or by size in contiguous amino acid residues. Antibodies which specifically bind any epitope or polypeptide of the present invention may also be excluded. Therefore, the present invention includes antibodies that specifically bind polypeptides of the present invention, and allows for the exclusion of the same.

[0166] Antibodies of the present invention may also be described or specified in terms of their cross-reactivity. Antibodies that do not bind any other analog, ortholog, or homolog of a polypeptide of the present invention are included. Antibodies that bind polypeptides with at least 95%, at least 90%, at least 85%, at least 80%, at least 75%, at least 70%, at least 65%, at least 60%, at least 55%, and at least 50% identity (as calculated using methods known in the art and described herein) to a polypeptide of the present invention are also included in the present invention. In specific embodiments, antibodies of the present invention cross-react with murine, rat and/or rabbit homologs of human proteins and the corresponding epitopes thereof. Antibodies that do not bind polypeptides with less than 95%, less than 90%, less than 85%, less than 80%, less than 75%, less than 70%, less than 65%, less than 60%, less than 55%, and less than 50% identity (as calculated using methods known in the art and described herein) to a polypeptide of the present invention are also included in the present invention. In a specific embodiment, the above-described cross-reactivity is with respect to any single specific antigenic or immunogenic polypeptide, or combination(s) of 2, 3, 4, 5, or more of the specific antigenic and/or immunogenic polypeptides disclosed herein. Further included in the present invention are antibodies which bind polypeptides encoded by polynucleotides which hybridize to a polynucleotide of the present invention under stringent hybridization conditions (as described herein). Antibodies of the present invention may also be described or specified in terms of their binding affinity to a polypeptide of the invention. Preferred binding affinities include those with a dissociation constant or Kd less than 5×10⁻² M, 10⁻² M, 5×10⁻³ M, 10⁻³ M, 5×10⁻⁴ M, 10⁴ M, 5×10⁻⁵ M, 5⁻⁵ M, 5×10⁻⁶ M, 10⁻⁶M, 5×10⁻⁷ M, 10⁷ M, 5×10⁻⁸ M, 10⁻⁸ M, 5×10⁻⁹ M, 10⁻⁹ M, 5×10⁻¹⁰ M, 10⁻¹⁰ M, 5×10⁻¹¹ M, 10¹¹ M, 5×10⁻¹² M, 10⁻¹² M, 5×10⁻¹³ M, 10⁻¹³ M, 5×10⁻¹⁴ M, 10⁻¹⁴ M, 5×10⁻¹⁵ M, or 10⁻¹⁵ M.

[0167] The invention also provides antibodies that competitively inhibit binding of an antibody to an epitope of the invention as determined by any method known in the art for determining competitive binding, for example, the immunoassays described herein. In preferred embodiments, the antibody competitively inhibits binding to the epitope by at least 95%, at least 90%, at least 85%, at least 80%, at least 75%, at least 70%, at least 60%, or at least 50%.

[0168] Antibodies of the present invention may act as agonists or antagonists of the polypeptides of the present invention. For example, the present invention includes antibodies which disrupt the receptor/ligand interactions with the polypeptides of the invention either partially or fully. Preferably, antibodies of the present invention bind an antigenic epitope disclosed herein, or a portion thereof. The invention features both receptor-specific antibodies and ligand-specific antibodies. The invention also features receptor-specific antibodies which do not prevent ligand binding but prevent receptor activation. Receptor activation (i.e., signaling) may be determined by techniques described herein or otherwise known in the art. For example, receptor activation can be determined by detecting the phosphorylation (e.g., tyrosine or serine/threonine) of the receptor or its substrate by immunoprecipitation followed by western blot analysis (for example, as described supra). In specific embodiments, antibodies are provided that inhibit ligand activity or receptor activity by at least 95%, at least 90%, at least 85%, at least 80%, at least 75%, at least 70%, at least 60%, or at least 50% of the activity in absence of the antibody.

[0169] The invention also features receptor-specific antibodies which both prevent ligand binding and receptor activation as well as antibodies that recognize the receptor-ligand complex, and, preferably, do not specifically recognize the unbound receptor or the unbound ligand. Likewise, included in the invention are neutralizing antibodies which bind the ligand and prevent binding of the ligand to the receptor, as well as antibodies which bind the ligand, thereby preventing receptor activation, but do not prevent the ligand from binding the receptor. Further included in the invention are antibodies which activate the receptor. These antibodies may act as receptor agonists, i.e., potentiate or activate either all or a subset of the biological activities of the ligand-mediated receptor activation, for example, by inducing dimerization of the receptor. The antibodies may be specified as agonists, antagonists or inverse agonists for biological activities comprising the specific biological activities of the peptides of the invention disclosed herein. The above antibody agonists can be made using methods known in the art. See, e.g., PCT publication WO 96/40281; U.S. Pat. No. 5,811,097; Deng et al., Blood 92(6):1981-1988 (1998); Chen et al., Cancer Res. 58(16):3668-3678 (1998); Harrop et al., J. Immunol. 161(4):1786-1794 (1998); Zhu et al., Cancer Res. 58(15):3209-3214 (1998); Yoon et al., J. Immunol. 160(7):3170-3179 (1998); Prat et al., J. Cell. Sci. 111(Pt2):237-247 (1998); Pitard et al., J. Immunol. Methods 205(2):177-190 (1997); Liautard et al., Cytokine 9(4):233-241 (1997); Carlson et al., J. Biol. Chem. 272(17):11295-11301 (1997); Taryman et al., Neuron 14(4):755-762 (1995); Muller et al., Structure 6(9):1153-1167 (1998); Bartunek et al., Cytokine 8(1):14-20 (1996) (which are all incorporated by reference herein in their entireties).

[0170] Antibodies of the present invention may be used, for example, but not limited to, to purify, detect, and target the polypeptides of the present invention, including both in vitro and in vivo diagnostic and therapeutic methods. For example, the antibodies have use in immunoassays for qualitatively and quantitatively measuring levels of the polypeptides of the present invention in biological samples. See, e.g., Harlow et al., Antibodies: A Laboratory Manual, (Cold Spring Harbor Laboratory Press, 2nd ed. 1988) (incorporated by reference herein in its entirety).

[0171] As discussed in more detail below, the antibodies of the present invention may be used either alone or in combination with other compositions. The antibodies may further be recombinantly fused to a heterologous polypeptide at the N- or C-terminus or chemically conjugated (including covalently and non-covalently conjugations) to polypeptides or other compositions. For example, antibodies of the present invention may be recombinantly fused or conjugated to molecules useful as labels in detection assays and effector molecules such as heterologous polypeptides, drugs, radionuclides, or toxins. See, e.g., PCT publications WO 92/08495; WO 91/14438; WO 89/12624; U.S. Pat. No. 5,314,995; and EP 396,387.

[0172] The antibodies of the invention include derivatives that are modified, i.e., by the covalent attachment of any type of molecule to the antibody such that covalent attachment does not prevent the antibody from generating an anti-idiotypic response. For example, but not by way of limitation, the antibody derivatives include antibodies that have been modified, e.g., by glycosylation, acetylation, pegylation, phosphylation, amidation, derivatization by known protecting/blocking groups, proteolytic cleavage, linkage to a cellular ligand or other protein, etc. Any of numerous chemical modifications may be carried out by known techniques, including, but not limited to specific chemical cleavage, acetylation, formylation, metabolic synthesis of tunicamycin, etc. Additionally, the derivative may contain one or more non-classical amino acids.

[0173] The antibodies of the present invention may be generated by any suitable method known in the art. Polyclonal antibodies to an antigen-of-interest can be produced by various procedures well known in the art. For example, a polypeptide of the invention can be administered to various host animals including, but not limited to, rabbits, mice, rats, etc. to induce the production of sera containing polyclonal antibodies specific for the antigen. Various adjuvants may be used to increase the immunological response, depending on the host species, and include but are not limited to, Freund's (complete and incomplete), mineral gels such as aluminum hydroxide, surface active substances such as lysolecithin, pluronic polyols, polyanions, peptides, oil emulsions, keyhole limpet hemocyanins, dinitrophenol, and potentially useful human adjuvants such as BCG (bacille Calmette-Guerin) and corynebacterium parvum. Such adjuvants are also well known in the art.

[0174] Monoclonal antibodies can be prepared using a wide variety of techniques known in the art including the use of hybridoma, recombinant, and phage display technologies, or a combination thereof. For example, monoclonal antibodies can be produced using hybridoma techniques including those known in the art and taught, for example, in Harlow et al., Antibodies: A Laboratory Manual, (Cold Spring Harbor Laboratory Press, 2nd ed. 1988); Hammerling, et al., in: Monoclonal Antibodies and T-Cell Hybridomas 563-681 (Elsevier, N.Y., 1981) (said references incorporated by reference in their entireties). The term “monoclonal antibody” as used herein is not limited to antibodies produced through hybridoma technology. The term “monoclonal antibody” refers to an antibody that is derived from a single clone, including any eukaryotic, prokaryotic, or phage clone, and not the method by which it is produced.

[0175] Methods for producing and screening for specific antibodies using hybridoma technology are routine and well known in the art and are discussed in detail in the Examples. In a non-limiting example, mice can be immunized with a polypeptide of the invention or a cell expressing such peptide. Once an immune response is detected, e.g., antibodies specific for the antigen are detected in the mouse serum, the mouse spleen is harvested and splenocytes isolated. The splenocytes are then fused by well known techniques to any suitable myeloma cells, for example cells from cell line SP20 available from the ATCC. Hybridomas are selected and cloned by limited dilution. The hybridoma clones are then assayed by methods known in the art for cells that secrete antibodies capable of binding a polypeptide of the invention. Ascites fluid, which generally contains high levels of antibodies, can be generated by immunizing mice with positive hybridoma clones.

[0176] Accordingly, the present invention provides methods of generating monoclonal antibodies as well as antibodies produced by the method comprising culturing a hybridoma cell secreting an antibody of the invention wherein, preferably, the hybridoma is generated by fusing splenocytes isolated from a mouse immunized with an antigen of the invention with myeloma cells and then screening the hybridomas resulting from the fusion for hybridoma clones that secrete an antibody able to bind a polypeptide of the invention.

[0177] Antibody fragments which recognize specific epitopes may be generated by known techniques. For example, Fab and F(ab′)2 fragments of the invention may be produced by proteolytic cleavage of immunoglobulin molecules, using enzymes such as papain (to produce Fab fragments) or pepsin (to produce F(ab′)2 fragments). F(ab′)2 fragments contain the variable region, the light chain constant region and the CH1 domain of the heavy chain.

[0178] For example, the antibodies of the present invention can also be generated using various phage display methods known in the art. In phage display methods, functional antibody domains are displayed on the surface of phage particles which carry the polynucleotide sequences encoding them. In a particular embodiment, such phage can be utilized to display antigen binding domains expressed from a repertoire or combinatorial antibody library (e.g., human or murine). Phage expressing an antigen binding domain that binds the antigen of interest can be selected or identified with antigen, e.g., using labeled antigen or antigen bound or captured to a solid surface or bead. Phage used in these methods are typically filamentous phage including fd and M13 binding domains expressed from phage with Fab, Fv or disulfide stabilized Fv antibody domains recombinantly fused to either the phage gene III or gene VIII protein. Examples of phage display methods that can be used to make the antibodies of the present invention include those disclosed in Brinkman et al., J. Immunol. Methods 182:41-50 (1995); Ames et al., J. Immunol. Methods 184:177-186 (1995); Kettleborough et al., Eur. J. Immunol. 24:952-958 (1994); Persic et al., Gene 187 9-18 (1997); Burton et al., Advances in Immunology 57:191-280 (1994); PCT application No. PCT/GB91/01 134; PCT publications WO 90/02809; WO 91/10737; WO 92/01047; WO 92/18619; WO 93/11236; WO 95/15982; WO 95/20401; and U.S. Pat. Nos. 5,698,426; 5,223,409; 5,403,484; 5,580,717; 5,427,908; 5,750,753; 5,821,047; 5,571,698; 5,427,908; 5,516,637; 5,780,225; 5,658,727; 5,733,743 and 5,969,108; each of which is incorporated herein by reference in its entirety.

[0179] As described in the above references, after phage selection, the antibody coding regions from the phage can be isolated and used to generate whole antibodies, including human antibodies, or any other desired antigen binding fragment, and expressed in any desired host, including mammalian cells, insect cells, plant cells, yeast, and bacteria, e.g., as described in detail below. For example, techniques to recombinantly produce Fab, Fab′ and F(ab′)2 fragments can also be employed using methods known in the art such as those disclosed in PCT publication WO 92/22324; Mullinax et al., BioTechniques 12(6):864-869 (1992); and Sawai et al., AJRI 34:26-34 (1995); and Better et al., Science 240:1041-1043 (1988) (said references incorporated by reference in their entireties).

[0180] Examples of techniques which can be used to produce single-chain Fvs and antibodies include those described in U.S. Pat. Nos. 4,946,778 and 5,258,498; Huston et al., Methods in Enzymology 203:46-88 (1991); Shu et al., PNAS 90:7995-7999 (1993); and Skerra et al., Science 240:1038-1040 (1988). For some uses, including in vivo use of antibodies in humans and in vitro detection assays, it may be preferable to use chimeric, humanized, or human antibodies. A chimeric antibody is a molecule in which different portions of the antibody are derived from different animal species, such as antibodies having a variable region derived from a murine monoclonal antibody and a human immunoglobulin constant region. Methods for producing chimeric antibodies are known in the art. See e.g., Morrison, Science 229:1202 (1985); Oi et al., BioTechniques 4:214 (1986); Gillies et al., (1989) J. Immunol. Methods 125:191-202; U.S. Pat. Nos. 5,807,715; 4,816,567; and 4,816397, which are incorporated herein by reference in their entirety. Humanized antibodies are antibody molecules from non-human species antibody that binds the desired antigen having one or more complementarity determining regions (CDRs) from the non-human species and a framework regions from a human immunoglobulin molecule. Often, framework residues in the human framework regions will be substituted with the corresponding residue from the CDR donor antibody to alter, preferably improve, antigen binding. These framework substitutions are identified by methods well known in the art, e.g., by modeling of the interactions of the CDR and framework residues to identify framework residues important for antigen binding and sequence comparison to identify unusual framework residues at particular positions. (See, e.g., Queen et al., U.S. Pat. No. 5,585,089; Riechmann et al., Nature 332:323 (1988), which are incorporated herein by reference in their entireties.) Antibodies can be humanized using a variety of techniques known in the art including, for example, CDR-grafting (EP 239,400; PCT publication WO 91/09967; U.S. Pat. Nos. 5,225,539; 5,530,101; and 5,585,089), veneering or resurfacing (EP 592,106; EP 519,596; Padlan, Molecular Immunology 28(4/5):489-498 (1991); Studnicka et al., Protein Engineering 7(6):805-814 (1994); Roguska. et al., PNAS 91:969-973 (1994)), and chain shuffling (U.S. Pat. No. 5,565,332).

[0181] Completely human antibodies are particularly desirable for therapeutic treatment of human patients. Human antibodies can be made by a variety of methods known in the art including phage display methods described above using antibody libraries derived from human immunoglobulin sequences. See also, U.S. Pat. Nos. 4,444,887 and 4,716,111; and PCT publications WO 98/46645, WO 98/50433, WO 98/24893, WO 98/16654, WO 96/34096, WO 96/33735, and WO 91/10741; each of which is incorporated herein by reference in its entirety.

[0182] Human antibodies can also be produced using transgenic mice which are incapable of expressing functional endogenous immunoglobulins, but which can express human immunoglobulin genes. For example, the human heavy and light chain immunoglobulin gene complexes may be introduced randomly or by homologous recombination into mouse embryonic stem cells. Alternatively, the human variable region, constant region, and diversity region may be introduced into mouse embryonic stem cells in addition to the human heavy and light chain genes. The mouse heavy and light chain immunoglobulin genes may be rendered non-functional separately or simultaneously with the introduction of human immunoglobulin loci by homologous recombination. In particular, homozygous deletion of the JH region prevents endogenous antibody production. The modified embryonic stem cells are expanded and microinjected into blastocysts to produce chimeric mice. The chimeric mice are then bred to produce homozygous offspring which express human antibodies. The transgenic mice are immunized in the normal fashion with a selected antigen, e.g., all or a portion of a polypeptide of the invention. Monoclonal antibodies directed against the antigen can be obtained from the immunized, transgenic mice using conventional hybridoma technology. The human immunoglobulin transgenes harbored by the transgenic mice rearrange during B cell differentiation, and subsequently undergo class switching and somatic mutation. Thus, using such a technique, it is possible to produce therapeutically useful IgG, IgA, IgM and IgE antibodies. For an overview of this technology for producing human antibodies, see Lonberg and Huszar, Int. Rev. Immunol. 13:65-93 (1995). For a detailed discussion of this technology for producing human antibodies and human monoclonal antibodies and protocols for producing such antibodies, see, e.g., PCT publications WO 98/24893; WO 92/01047; WO 96/34096; WO 96/33735; European Patent No. 0 598 877; U.S. Pat. Nos. 5,413,923; 5,625,126; 5,633,425; 5,569,825; 5,661,016; 5,545,806; 5,814,318; 5,885,793; 5,916,771; and 5,939,598, which are incorporated by reference herein in their entirety. In addition, companies such as Abgenix, Inc. (Freemont, Calif.) and Genpharm (San Jose, Calif.) can be engaged to provide human antibodies directed against a selected antigen using technology similar to that described above.

[0183] Completely human antibodies which recognize a selected epitope can be generated using a technique referred to as “guided selection.” In this approach a selected non-human monoclonal antibody, e.g., a mouse antibody, is used to guide the selection of a completely human antibody recognizing the same epitope. (Jespers et al., Bio/technology 12:899-903 (1988)).

[0184] Further, antibodies to the polypeptides of the invention can, in turn, be utilized to generate anti-idiotype antibodies that “mimic” polypeptides of the invention using techniques well known to those skilled in the art. (See, e.g., Greenspan & Bona, FASEB J. 7(5):437-444; (1989) and Nissinoff, J. Immunol. 147(8):2429-2438 (1991)) For example, antibodies which bind to and competitively inhibit polypeptide multimerization and/or binding of a polypeptide of the invention to a ligand can be used to generate anti-idiotypes that “mimic” the polypeptide multimerization and/or binding domain and, as a consequence, bind to and neutralize polypeptide and/or its ligand. Such neutralizing anti-idiotypes or Fab fragments of such anti-idiotypes can be used in therapeutic regimens to neutralize polypeptide ligand. For example, such anti-idiotypic antibodies can be used to bind a polypeptide of the invention and/or to bind its ligands/receptors, and thereby block its biological activity.

[0185] Polynucleotides Encoding Antibodies

[0186] The invention further provides polynucleotides comprising a nucleotide sequence encoding an antibody of the invention and fragments thereof. The invention also encompasses polynucleotides that hybridize under stringent or alternatively, under lower stringency hybridization conditions, e.g., as defined supra, to polynucleotides that encode an antibody, preferably, that specifically binds to a polypeptide of the invention, preferably, an antibody that binds to a polypeptide having the amino acid sequence of SEQ ID NO:Y.

[0187] The polynucleotides may be obtained, and the nucleotide sequence of the polynucleotides determined, by any method known in the art. For example, if the nucleotide sequence of the antibody is known, a polynucleotide encoding the antibody may be assembled from chemically synthesized oligonucleotides (e.g., as described in Kutmeier et al., BioTechniques 17:242 (1994)), which, briefly, involves the synthesis of overlapping oligonucleotides containing portions of the sequence encoding the antibody, annealing and ligating of those oligonucleotides, and then amplification of the ligated oligonucleotides by PCR.

[0188] Alternatively, a polynucleotide encoding an antibody may be generated from nucleic acid from a suitable source. If a clone containing a nucleic acid encoding a particular antibody is not available, but the sequence of the antibody molecule is known, a nucleic acid encoding the immunoglobulin may be chemically synthesized or obtained from a suitable source (e.g., an antibody cDNA library, or a cDNA library generated from, or nucleic acid, preferably poly A+ RNA, isolated from, any tissue or cells expressing the antibody, such as hybridoma cells selected to express an antibody of the invention) by PCR amplification using synthetic primers hybridizable to the 3′ and 5′ ends of the sequence or by cloning using an oligonucleotide probe specific for the particular gene sequence to identify, e.g., a cDNA clone from a cDNA library that encodes the antibody. Amplified nucleic acids generated by PCR may then be cloned into replicable cloning vectors using any method well known in the art.

[0189] Once the nucleotide sequence and corresponding amino acid sequence of the antibody is determined, the nucleotide sequence of the antibody may be manipulated using methods well known in the art for the manipulation of nucleotide sequences, e.g., recombinant DNA techniques, site directed mutagenesis, PCR, etc. (see, for example, the techniques described in Sambrook et al., 1990, Molecular Cloning, A Laboratory Manual, 2d Ed., Cold Spring Harbor Laboratory, Cold Spring Harbor, N.Y. and Ausubel et al., eds., 1998, Current Protocols in Molecular Biology, John Wiley & Sons, NY, which are both incorporated by reference herein in their entireties ), to generate antibodies having a different amino acid sequence, for example to create amino acid substitutions, deletions, and/or insertions.

[0190] In a specific embodiment, the amino acid sequence of the heavy and/or light chain variable domains may be inspected to identify the sequences of the complementarity determining regions (CDRs) by methods that are well know in the art, e.g., by comparison to known amino acid sequences of other heavy and light chain variable regions to determine the regions of sequence hypervariability. Using routine recombinant DNA techniques, one or more of the CDRs may be inserted within framework regions, e.g., into human framework regions to humanize a non-human antibody, as described supra. The framework regions may be naturally occurring or consensus framework regions, and preferably human framework regions (see, e.g., Chothia et al., J. Mol. Biol. 278: 457-479 (1998) for a listing of human framework regions). Preferably, the polynucleotide generated by the combination of the framework regions and CDRs encodes an antibody that specifically binds a polypeptide of the invention. Preferably, as discussed supra, one or more amino acid substitutions may be made within the framework regions, and, preferably, the amino acid substitutions improve binding of the antibody to its antigen. Additionally, such methods may be used to make amino acid substitutions or deletions of one or more variable region cysteine residues participating in an intrachain disulfide bond to generate antibody molecules lacking one or more intrachain disulfide bonds. Other alterations to the polynucleotide are encompassed by the present invention and within the skill of the art.

[0191] In addition, techniques developed for the production of “chimeric antibodies” (Morrison et al., Proc. Natl. Acad. Sci. 81:851-855 (1984); Neuberger et al., Nature 312:604-608 (1984); Takeda et al., Nature 314:452-454 (1985)) by splicing genes from a mouse antibody molecule of appropriate antigen specificity together with genes from a human antibody molecule of appropriate biological activity can be used. As described supra, a chimeric antibody is a molecule in which different portions are derived from different animal species, such as those having a variable region derived from a murine mAb and a human immunoglobulin constant region, e.g., humanized antibodies.

[0192] Alternatively, techniques described for the production of single chain antibodies (U.S. Pat. No. 4,946,778; Bird, Science 242:423-42 (1988); Huston et al., Proc. Natl. Acad. Sci. USA 85:5879-5883 (1988); and Ward et al., Nature 334:544-54 (1989)) can be adapted to produce single chain antibodies. Single chain antibodies are formed by linking the heavy and light chain fragments of the Fv region via an amino acid bridge, resulting in a single chain polypeptide. Techniques for the assembly of functional Fv fragments in E. coli may also be used (Skerra et al., Science 242:1038-1041 (1988)).

[0193] Methods of Producing Antibodies

[0194] The antibodies of the invention can be produced by any method known in the art for the synthesis of antibodies, in particular, by chemical synthesis or preferably, by recombinant expression techniques.

[0195] Recombinant expression of an antibody of the invention, or fragment, derivative or analog thereof, (e.g., a heavy or light chain of an antibody of the invention or a single chain antibody of the invention), requires construction of an expression vector containing a polynucleotide that encodes the antibody. Once a polynucleotide encoding an antibody molecule or a heavy or light chain of an antibody, or portion thereof (preferably containing the heavy or light chain variable domain), of the invention has been obtained, the vector for the production of the antibody molecule may be produced by recombinant DNA technology using techniques well known in the art. Thus, methods for preparing a protein by expressing a polynucleotide containing an antibody encoding nucleotide sequence are described herein. Methods which are well known to those skilled in the art can be used to construct expression vectors containing antibody coding sequences and appropriate transcriptional and translational control signals. These methods include, for example, in vitro recombinant DNA techniques, synthetic techniques, and in vivo genetic recombination. The invention, thus, provides replicable vectors comprising a nucleotide sequence encoding an antibody molecule of the invention, or a heavy or light chain thereof, or a heavy or light chain variable domain, operably linked to a promoter. Such vectors may include the nucleotide sequence encoding the constant region of the antibody molecule (see, e.g., PCT Publication WO 86/05807; PCT Publication WO 89/01036; and U.S. Pat. No. 5,122,464) and the variable domain of the antibody may be cloned into such a vector for expression of the entire heavy or light chain.

[0196] The expression vector is transferred to a host cell by conventional techniques and the transfected cells are then cultured by conventional techniques to produce an antibody of the invention. Thus, the invention includes host cells containing a polynucleotide encoding an antibody of the invention, or a heavy or light chain thereof, or a single chain antibody of the invention, operably linked to a heterologous promoter. In preferred embodiments for the expression of double-chained antibodies, vectors encoding both the heavy and light chains may be co-expressed in the host cell for expression of the entire immunoglobulin molecule, as detailed below.

[0197] A variety of host-expression vector systems may be utilized to express the antibody molecules of the invention. Such host-expression systems represent vehicles by which the coding sequences of interest may be produced and subsequently purified, but also represent cells which may, when transformed or transfected with the appropriate nucleotide coding sequences, express an antibody molecule of the invention in situ. These include but are not limited to microorganisms such as bacteria (e.g., E. coli, B. subtilis) transformed with recombinant bacteriophage DNA, plasmid DNA or cosmid DNA expression vectors containing antibody coding sequences; yeast (e.g., Saccharomyces, Pichia) transformed with recombinant yeast expression vectors containing antibody coding sequences; insect cell systems infected with recombinant virus expression vectors (e.g., baculovirus) containing antibody coding sequences; plant cell systems infected with recombinant virus expression vectors (e.g., cauliflower mosaic virus, CaMV; tobacco mosaic virus, TMV) or transformed with recombinant plasmid expression vectors (e.g., Ti plasmid) containing antibody coding sequences; or mammalian cell systems (e.g., COS, CHO, BHK, 293, 3T3 cells) harboring recombinant expression constructs containing promoters derived from the genome of mammalian cells (e.g., metallothionein promoter) or from mammalian viruses (e.g., the adenovirus late promoter; the vaccinia virus 7.5K promoter). Preferably, bacterial cells such as Escherichia coli, and more preferably, eukaryotic cells, especially for the expression of whole recombinant antibody molecule, are used for the expression of a recombinant antibody molecule. For example, mammalian cells such as Chinese hamster ovary cells (CHO), in conjunction with a vector such as the major intermediate early gene promoter element from human cytomegalovirus is an effective expression system for antibodies (Foecking et al., Gene 45:101 (1986); Cockett et al., Bio/Technology 8:2 (1990)).

[0198] In bacterial systems, a number of expression vectors may be advantageously selected depending upon the use intended for the antibody molecule being expressed. For example, when a large quantity of such a protein is to be produced, for the generation of pharmaceutical compositions of an antibody molecule, vectors which direct the expression of high levels of fusion protein products that are readily purified may be desirable. Such vectors include, but are not limited, to the E. coli expression vector pUR278 (Ruther et al., EMBO J. 2:1791 (1983)), in which the antibody coding sequence may be ligated individually into the vector in frame with the lac Z coding region so that a fusion protein is produced; pIN vectors (Inouye & Inouye, Nucleic Acids Res. 13:3101-3109 (1985); Van Heeke & Schuster, J. Biol. Chem. 24:5503-5509 (1989)); and the like. pGEX vectors may also be used to express foreign polypeptides as fusion proteins with glutathione S-transferase (GST). In general, such fusion proteins are soluble and can easily be purified from lysed cells by adsorption and binding to matrix glutathione-agarose beads followed by elution in the presence of free glutathione. The pGEX vectors are designed to include thrombin or factor Xa protease cleavage sites so that the cloned target gene product can be released from the GST moiety.

[0199] In an insect system, Autographa californica nuclear polyhedrosis virus (AcNPV) is used as a vector to express foreign genes. The virus grows in Spodoptera frugiperda cells. The antibody coding sequence may be cloned individually into non-essential regions (for example the polyhedrin gene) of the virus and placed under control of an AcNPV promoter (for example the polyhedrin promoter).

[0200] In mammalian host cells, a number of viral-based expression systems may be utilized. In cases where an adenovirus is used as an expression vector, the antibody coding sequence of interest may be ligated to an adenovirus transcription/translation control complex, e.g., the late promoter and tripartite leader sequence. This chimeric gene may then be inserted in the adenovirus genome by in vitro or in vivo recombination. Insertion in a non-essential region of the viral genome (e.g., region E1 or E3) will result in a recombinant virus that is viable and capable of expressing the antibody molecule in infected hosts. (e.g., see Logan & Shenk, Proc. Natl. Acad. Sci. USA 81:355-359 (1984)). Specific initiation signals may also be required for efficient translation of inserted antibody coding sequences. These signals include the ATG initiation codon and adjacent sequences. Furthermore, the initiation codon must be in phase with the reading frame of the desired coding sequence to ensure translation of the entire insert. These exogenous translational control signals and initiation codons can be of a variety of origins, both natural and synthetic. The efficiency of expression may be enhanced by the inclusion of appropriate transcription enhancer elements, transcription terminators, etc. (see Bittner et al., Methods in Enzymol. 153:51-544 (1987)).

[0201] In addition, a host cell strain may be chosen which modulates the expression of the inserted sequences, or modifies and processes the gene product in the specific fashion desired. Such modifications (e.g., glycosylation) and processing (e.g., cleavage) of protein products may be important for the function of the protein. Different host cells have characteristic and specific mechanisms for the post-translational processing and modification of proteins and gene products. Appropriate cell lines or host systems can be chosen to ensure the correct modification and processing of the foreign protein expressed. To this end, eukaryotic host cells which possess the cellular machinery for proper processing of the primary transcript, glycosylation, and phosphorylation of the gene product may be used. Such mammalian host cells include but are not limited to CHO, VERY, BHK, Hela, COS, MDCK, 293, 3T3, W138, and in particular, breast cancer cell lines such as, for example, BT483, Hs578T, HTB2, BT20 and T47D, and normal mammary gland cell line such as, for example, CRL7030 and Hs578Bst.

[0202] For long-term, high-yield production of recombinant proteins, stable expression is preferred. For example, cell lines which stably express the antibody molecule may be engineered. Rather than using expression vectors which contain viral origins of replication, host cells can be transformed with DNA controlled by appropriate expression control elements (e.g., promoter, enhancer, sequences, transcription terminators, polyadenylation sites, etc.), and a selectable marker. Following the introduction of the foreign DNA, engineered cells may be allowed to grow for 1-2 days in an enriched media, and then are switched to a selective media. The selectable marker in the recombinant plasmid confers resistance to the selection and allows cells to stably integrate the plasmid into their chromosomes and grow to form foci which in turn can be cloned and expanded into cell lines. This method may advantageously be used to engineer cell lines which express the antibody molecule. Such engineered cell lines may be particularly useful in screening and evaluation of compounds that interact directly or indirectly with the antibody molecule.

[0203] A number of selection systems may be used, including but not limited to the herpes simplex virus thymidine kinase (Wigler et al., Cell 11:223 (1977)), hypoxanthine-guanine phosphoribosyltransferase (Szybalska & Szybalski, Proc. Natl. Acad. Sci. USA 48:202 (1992)), and adenine phosphoribosyltransferase (Lowy et al., Cell 22:817 (1980)) genes can be employed in tk-, hgprt- or aprt-cells, respectively. Also, antimetabolite resistance can be used as the basis of selection for the following genes: dhfr, which confers resistance to methotrexate (Wigler et al., Natl. Acad. Sci. USA 77:357 (1980); O'Hare et al., Proc. Natl. Acad. Sci. USA 78:1527 (1981)); gpt, which confers resistance to mycophenolic acid (Mulligan & Berg, Proc. Natl. Acad. Sci. USA 78:2072 (1981)); neo, which confers resistance to the aminoglycoside G-418 Clinical Pharmacy 12:488-505; Wu and Wu, Biotherapy 3:87-95 (1991); Tolstoshev, Ann. Rev. Pharmacol. Toxicol. 32:573-596 (1993); Mulligan, Science 260:926-932 (1993); and Morgan and Anderson, Ann. Rev. Biochem. 62:191-217 (1993); May, 1993, TIB TECH 11(5):155-215); and hygro, which confers resistance to hygromycin (Santerre et al., Gene 30:147 (1984)). Methods commonly known in the art of recombinant DNA technology may be routinely applied to select the desired recombinant clone, and such methods are described, for example, in Ausubel et al. (eds.), Current Protocols in Molecular Biology, John Wiley & Sons, NY (1993); Kriegler, Gene Transfer and Expression, A Laboratory Manual, Stockton Press, NY (1990); and in Chapters 12 and 13, Dracopoli et al. (eds), Current Protocols in Human Genetics, John Wiley & Sons, NY (1994); Colberre-Garapin et al., J. Mol. Biol. 150:1 (1981), which are incorporated by reference herein in their entireties.

[0204] The expression levels of an antibody molecule can be increased by vector amplification (for a review, see Bebbington and Hentschel, The use of vectors based on gene amplification for the expression of cloned genes in mammalian cells in DNA cloning, Vol. 3. (Academic Press, New York, 1987)). When a marker in the vector system expressing antibody is amplifiable, increase in the level of inhibitor present in culture of host cell will increase the number of copies of the marker gene. Since the amplified region is associated with the antibody gene, production of the antibody will also increase (Crouse et al., Mol. Cell. Biol. 3:257 (1983)).

[0205] The host cell may be co-transfected with two expression vectors of the invention, the first vector encoding a heavy chain derived polypeptide and the second vector encoding a light chain derived polypeptide. The two vectors may contain identical selectable markers which enable equal expression of heavy and light chain polypeptides. Alternatively, a single vector may be used which encodes, and is capable of expressing, both heavy and light chain polypeptides. In such situations, the light chain should be placed before the heavy chain to avoid an excess of toxic free heavy chain (Proudfoot, Nature 322:52 (1986); Kohler, Proc. Natl. Acad. Sci. USA 77:2197 (1980)). The coding sequences for the heavy and light chains may comprise cDNA or genomic DNA.

[0206] Once an antibody molecule of the invention has been produced by an animal, chemically synthesized, or recombinantly expressed, it may be purified by any method known in the art for purification of an immunoglobulin molecule, for example, by chromatography (e.g., ion exchange, affinity, particularly by affinity for the specific antigen after Protein A, and sizing column chromatography), centrifugation, differential solubility, or by any other standard technique for the purification of proteins. In addition, the antibodies of the present invention or fragments thereof can be fused to heterologous polypeptide sequences described herein or otherwise known in the art, to facilitate purification.

[0207] The present invention encompasses antibodies recombinantly fused or chemically conjugated (including both covalently and non-covalently conjugations) to a polypeptide (or portion thereof, preferably at least 10, 20, 30, 40, 50, 60, 70, 80, 90 or 100 amino acids of the polypeptide) of the present invention to generate fusion proteins. The fusion does not necessarily need to be direct, but may occur through linker sequences. The antibodies may be specific for antigens other than polypeptides (or portion thereof, preferably at least 10, 20, 30, 40, 50, 60, 70, 80, 90 or 100 amino acids of the polypeptide) of the present invention. For example, antibodies may be used to target the polypeptides of the present invention to particular cell types, either in vitro or in vivo, by fusing or conjugating the polypeptides of the present invention to antibodies specific for particular cell surface receptors. Antibodies fused or conjugated to the polypeptides of the present invention may also be used in in vitro immunoassays and purification methods using methods known in the art. See e.g., Harbor et al., supra, and PCT publication WO 93/21232; EP 439,095; Naramura et al., Immunol. Lett. 39:91-99 (1994); U.S. Pat. No. 5,474,981; Gillies et al., PNAS 89:1428-1432 (1992); Fell et al., J. Immunol. 146:2446-2452(1991), which are incorporated by reference in their entireties.

[0208] The present invention further includes compositions comprising the polypeptides of the present invention fused or conjugated to antibody domains other than the variable regions. For example, the polypeptides of the present invention may be fused or conjugated to an antibody Fc region, or portion thereof. The antibody portion fused to a polypeptide of the present invention may comprise the constant region, hinge region, CH1 domain, CH2 domain, and CH3 domain or any combination of whole domains or portions thereof. The polypeptides may also be fused or conjugated to the above antibody portions to form multimers. For example, Fc portions fused to the polypeptides of the present invention can form dimers through disulfide bonding between the Fc portions. Higher multimeric forms can be made by fusing the polypeptides to portions of IgA and IgM. Methods for fusing or conjugating the polypeptides of the present invention to antibody portions are known in the art. See, e.g., U.S. Pat. Nos. 5,336,603; 5,622,929; 5,359,046; 5,349,053; 5,447,851; 5,112,946; EP 307,434; EP 367,166; PCT publications WO 96/04388; WO 91/06570; Ashkenazi et al., Proc. Natl. Acad. Sci. USA 88:10535-10539 (1991); Zheng et al., J. Immunol. 154:5590-5600 (1995); and Vil et al., Proc. Natl. Acad. Sci. USA 89:11337-11341(1992) (said references incorporated by reference in their entireties).

[0209] As discussed, supra, the polypeptides corresponding to a polypeptide, polypeptide fragment, or a variant of SEQ ID NO:Y may be fused or conjugated to the above antibody portions to increase the in vivo half life of the polypeptides or for use in immunoassays using methods known in the art. Further, the polypeptides corresponding to SEQ ID NO:Y may be fused or conjugated to the above antibody portions to facilitate purification. One reported example describes chimeric proteins consisting of the first two domains of the human CD4-polypeptide and various domains of the constant regions of the heavy or light chains of mammalian immunoglobulins. (EP 394,827; Traunecker et al., Nature 331:84-86 (1988). The polypeptides of the present invention fused or conjugated to an antibody having disulfide-linked dimeric structures (due to the IgG) may also be more efficient in binding and neutralizing other molecules, than the monomeric secreted protein or protein fragment alone. (Fountoulakis et al., J. Biochem. 270:3958-3964 (1995)). In many cases, the Fc part in a fusion protein is beneficial in therapy and diagnosis, and thus can result in, for example, improved pharmacokinetic properties. (EP A 232,262). Alternatively, deleting the Fc part after the fusion protein has been expressed, detected, and purified, would be desired. For example, the Fc portion may hinder therapy and diagnosis if the fusion protein is used as an antigen for immunizations. In drug discovery, for example, human proteins, such as hIL-5, have been fused with Fc portions for the purpose of high-throughput screening assays to identify antagonists of hIL-5. (See, Bennett et al., J. Molecular Recognition 8:52-58 (1995); Johanson et al., J. Biol. Chem. 270:9459-9471 (1995).

[0210] Moreover, the antibodies or fragments thereof of the present invention can be fused to marker sequences, such as a peptide to facilitate purification. In preferred embodiments, the marker amino acid sequence is a hexa-histidine peptide, such as the tag provided in a pQE vector (QIAGEN, Inc., 9259 Eton Avenue, Chatsworth, Calif., 91311), among others, many of which are commercially available. As described in Gentz et al., Proc. Natl. Acad. Sci. USA 86:821-824 (1989), for instance, hexa-histidine provides for convenient purification of the fusion protein. Other peptide tags useful for purification include, but are not limited to, the “HA” tag, which corresponds to an epitope derived from the influenza hemagglutinin protein (Wilson et al., Cell 37:767 (1984)) and the “flag” tag.

[0211] The present invention further encompasses antibodies or fragments thereof conjugated to a diagnostic or therapeutic agent. The antibodies can be used diagnostically to, for example, monitor the development or progression of a tumor as part of a clinical testing procedure to, e.g., determine the efficacy of a given treatment regimen. Detection can be facilitated by coupling the antibody to a detectable substance. Examples of detectable substances include various enzymes, prosthetic groups, fluorescent materials, luminescent materials, bioluminescent materials, radioactive materials, positron emitting metals using various positron emission tomographies, and nonradioactive paramagnetic metal ions. The detectable substance may be coupled or conjugated either directly to the antibody (or fragment thereof) or indirectly, through an intermediate (such as, for example, a linker known in the art) using techniques known in the art. See, for example, U.S. Pat. No. 4,741,900 for metal ions which can be conjugated to antibodies for use as diagnostics according to the present invention. Examples of suitable enzymes include horseradish peroxidase, alkaline phosphatase, beta-galactosidase, or acetylcholinesterase; examples of suitable prosthetic group complexes include streptavidin/biotin and avidin/biotin; examples of suitable fluorescent materials include umbelliferone, fluorescein, fluorescein isothiocyanate, rhodamine, dichlorotriazinylamine fluorescein, dansyl chloride or phycoerythrin; an example of a luminescent material includes luminol; examples of bioluminescent materials include luciferase, luciferin, and aequorin; and examples of suitable radioactive material include 125I, 131I, 111In or 99Tc.

[0212] Further, an antibody or fragment thereof may be conjugated to a therapeutic moiety such as a cytotoxin, e.g., a cytostatic or cytocidal agent, a therapeutic agent or a radioactive metal ion, e.g., alpha-emitters such as, for example, 213Bi. A cytotoxin or cytotoxic agent includes any agent that is detrimental to cells. Examples include paclitaxol, cytochalasin B, gramicidin D, ethidium bromide, emetine, mitomycin, etoposide, tenoposide, vincristine, vinblastine, colchicin, doxorubicin, daunorubicin, dihydroxy anthracin dione, mitoxantrone, mithramycin, actinomycin D, 1-dehydrotestosterone, glucocorticoids, procaine, tetracaine, lidocaine, propranolol, and puromycin and analogs or homologs thereof. Therapeutic agents include, but are not limited to, antimetabolites (e.g., methotrexate, 6-mercaptopurine, 6-thioguanine, cytarabine, 5-fluorouracil decarbazine), alkylating agents (e.g., mechlorethamine, thioepa chlorambucil, melphalan, carmustine (BSNU) and lomustine (CCNU), cyclothosphamide, busulfan, dibromomannitol, streptozotocin, mitomycin C, and cis-dichlorodiamine platinum (II) (DDP) cisplatin), anthracyclines (e.g., daunorubicin (formerly daunomycin) and doxorubicin), antibiotics (e.g., dactinomycin (formerly actinomycin), bleomycin, mithramycin, and anthramycin (AMC)), and anti-mitotic agents (e.g., vincristine and vinblastine).

[0213] The conjugates of the invention can be used for modifying a given biological response, the therapeutic agent or drug moiety is not to be construed as limited to classical chemical therapeutic agents. For example, the drug moiety may be a protein or polypeptide possessing a desired biological activity. Such proteins may include, for example, a toxin such as abrin, ricin A, pseudomonas exotoxin, or diphtheria toxin; a protein such as tumor necrosis factor, a-interferon, β-interferon, nerve growth factor, platelet derived growth factor, tissue plasminogen activator, an apoptotic agent, e.g., TNF-alpha, TNF-beta, AIM I (See, International Publication No. WO 97/33899), AIM II (See, International Publication No. WO 97/34911), Fas Ligand (Takahashi et al., Int. Immunol., 6:1567-1574 (1994)), VEGI (See, International Publication No. WO 99/23105), a thrombotic agent or an anti-angiogenic agent, e.g., angiostatin or endostatin; or, biological response modifiers such as, for example, lymphokines, interleukin-1 (“IL-1”), interleukin-2 (“IL-2”), interleukin-6 (“IL-6”), granulocyte macrophage colony stimulating factor (“GM-CSF”), granulocyte colony stimulating factor (“G-CSF”), or other growth factors.

[0214] Antibodies may also be attached to solid supports, which are particularly useful for immunoassays or purification of the target antigen. Such solid supports include, but are not limited to, glass, cellulose, polyacrylamide, nylon, polystyrene, polyvinyl chloride or polypropylene.

[0215] Techniques for conjugating such therapeutic moiety to antibodies are well known, see, e.g., Arnon et al., “Monoclonal Antibodies For Immunotargeting Of Drugs In Cancer Therapy”, in Monoclonal Antibodies And Cancer Therapy, Reisfeld et al. (eds.), pp. 243-56 (Alan R. Liss, Inc. 1985); Hellstrom et al., “Antibodies For Drug Delivery”, in Controlled Drug Delivery (2nd Ed.), Robinson et al. (eds.), pp. 623-53 (Marcel Dekker, Inc. 1987); Thorpe, “Antibody Carriers Of Cytotoxic Agents In Cancer Therapy: A Review”, in Monoclonal Antibodies '84: Biological And Clinical Applications, Pinchera et al. (eds.), pp. 475-506 (1985); “Analysis, Results, And Future Prospective Of The Therapeutic Use Of Radiolabeled Antibody In Cancer Therapy”, in Monoclonal Antibodies For Cancer Detection And Therapy, Baldwin et al. (eds.), pp. 303-16 (Academic Press 1985), and Thorpe et al., “The Preparation And Cytotoxic Properties Of Antibody-Toxin Conjugates”, Immunol. Rev. 62:119-58 (1982).

[0216] Alternatively, an antibody can be conjugated to a second antibody to form an antibody heteroconjugate as described by Segal in U.S. Pat. No. 4,676,980, which is incorporated herein by reference in its entirety.

[0217] An antibody, with or without a therapeutic moiety conjugated to it, administered alone or in combination with cytotoxic factor(s) and/or cytokine(s) can be used as a therapeutic.

[0218] Immunophenotyping

[0219] The antibodies of the invention may be utilized for immunophenotyping of cell lines and biological samples. The translation product of the gene of the present invention may be useful as a cell specific marker, or more specifically as a cellular marker that is differentially expressed at various stages of differentiation and/or maturation of particular cell types. Monoclonal antibodies directed against a specific epitope, or combination of epitopes, will allow for the screening of cellular populations expressing the marker. Various techniques can be utilized using monoclonal antibodies to screen for cellular populations expressing the marker(s), and include magnetic separation using antibody-coated magnetic beads, “panning” with antibody attached to a solid matrix (i.e., plate), and flow cytometry (See, e.g., U.S. Pat. No. 5,985,660; and Morrison et al., Cell, 96:737-49 (1999)).

[0220] These techniques allow for the screening of particular populations of cells, such as might be found with hematological malignancies (i.e. minimal residual disease (MRD) in acute leukemic patients) and “non-self” cells in transplantations to prevent Graft-versus-Host Disease (GVHD). Alternatively, these techniques allow for the screening of hematopoietic stem and progenitor cells capable of undergoing proliferation and/or differentiation, as might be found in human umbilical cord blood.

[0221] Assays For Antibody Binding

[0222] The antibodies of the invention may be assayed for immunospecific binding by any method known in the art. The immunoassays which can be used include but are not limited to competitive and non-competitive assay systems using techniques such as western blots, radioimmunoassays, ELISA (enzyme linked immunosorbent assay), “sandwich” immunoassays, immunoprecipitation assays, precipitin reactions, gel diffusion precipitin reactions, immunodiffusion assays, agglutination assays, complement-fixation assays, immunoradiometric assays, fluorescent immunoassays, protein A immunoassays, to name but a few. Such assays are routine and well known in the art (see, e.g., Ausubel et al, eds, 1994, Current Protocols in Molecular Biology, Vol. 1, John Wiley & Sons, Inc., New York, which is incorporated by reference herein in its entirety). Exemplary immunoassays are described briefly below (but are not intended by way of limitation).

[0223] Immunoprecipitation protocols generally comprise lysing a population of cells in a lysis buffer such as RIPA buffer (1% NP-40 or Triton X-100, 1% sodium deoxycholate, 0.1% SDS, 0.15 M NaCl, 0.01 M sodium phosphate at pH 7.2, 1% Trasylol) supplemented with protein phosphatase and/or protease inhibitors (e.g., EDTA, PMSF, aprotinin, sodium vanadate), adding the antibody of interest to the cell lysate, incubating for a period of time (e.g., 1-4 hours) at 4° C., adding protein A and/or protein G sepharose beads to the cell lysate, incubating for about an hour or more at 4° C., washing the beads in lysis buffer and resuspending the beads in SDS/sample buffer. The ability of the antibody of interest to immunoprecipitate a particular antigen can be assessed by, e.g., western blot analysis. One of skill in the art would be knowledgeable as to the parameters that can be modified to increase the binding of the antibody to an antigen and decrease the background (e.g., pre-clearing the cell lysate with sepharose beads). For further discussion regarding immunoprecipitation protocols see, e.g., Ausubel et al, eds, 1994, Current Protocols in Molecular Biology, Vol. 1, John Wiley & Sons, Inc., New York at 10.16.1.

[0224] Western blot analysis generally comprises preparing protein samples, electrophoresis of the protein samples in a polyacrylamide gel (e.g., 8%-20% SDS-PAGE depending on the molecular weight of the antigen), transferring the protein sample from the polyacrylamide gel to a membrane such as nitrocellulose, PVDF or nylon, blocking the membrane in blocking solution (e.g., PBS with 3% BSA or non-fat milk), washing the membrane in washing buffer (e.g., PBS-Tween 20), blocking the membrane with primary antibody (the antibody of interest) diluted in blocking buffer, washing the membrane in washing buffer, blocking the membrane with a secondary antibody (which recognizes the primary antibody, e.g., an anti-human antibody) conjugated to an enzymatic substrate (e.g., horseradish peroxidase or alkaline phosphatase) or radioactive molecule (e.g., 32P or 125I) diluted in blocking buffer, washing the membrane in wash buffer, and detecting the presence of the antigen. One of skill in the art would be knowledgeable as to the parameters that can be modified to increase the signal detected and to reduce the background noise. For further discussion regarding western blot protocols see, e.g., Ausubel et al, eds, 1994, Current Protocols in Molecular Biology, Vol. 1, John Wiley & Sons, Inc., New York at 10.8.1.

[0225] ELISAs comprise preparing antigen, coating the well of a 96 well microtiter plate with the antigen, adding the antibody of interest conjugated to a detectable compound such as an enzymatic substrate (e.g., horseradish peroxidase or alkaline phosphatase) to the well and incubating for a period of time, and detecting the presence of the antigen. In ELISAs the antibody of interest does not have to be conjugated to a detectable compound; instead, a second antibody (which recognizes the antibody of interest) conjugated to a detectable compound may be added to the well. Further, instead of coating the well with the antigen, the antibody may be coated to the well. In this case, a second antibody conjugated to a detectable compound may be added following the addition of the antigen of interest to the coated well. One of skill in the art would be knowledgeable as to the parameters that can be modified to increase the signal detected as well as other variations of ELISAs known in the art. For further discussion regarding ELISAs see, e.g., Ausubel et al, eds, 1994, Current Protocols in Molecular Biology, Vol. 1, John Wiley & Sons, Inc., New York at 11.2.1.

[0226] The binding affinity of an antibody to an antigen and the off-rate of an antibody-antigen interaction can be determined by competitive binding assays. One example of a competitive binding assay is a radioimmunoassay comprising the incubation of labeled antigen (e.g., 3H or 125I) with the antibody of interest in the presence of increasing amounts of unlabeled antigen, and the detection of the antibody bound to the labeled antigen. The affinity of the antibody of interest for a particular antigen and the binding off-rates can be determined from the data by scatchard plot analysis. Competition with a second antibody can also be determined using radioimmunoassays. In this case, the antigen is incubated with antibody of interest conjugated to a labeled compound (e.g., 3H or 125I) in the presence of increasing amounts of an unlabeled second antibody.

[0227] Therapeutic Uses

[0228] The present invention is further directed to antibody-based therapies which involve administering antibodies of the invention to an animal, preferably a mammal, and most preferably a human, patient for treating one or more of the disclosed diseases, disorders, or conditions. Therapeutic compounds of the invention include, but are not limited to, antibodies of the invention (including fragments, analogs and derivatives thereof as described herein) and nucleic acids encoding antibodies of the invention (including fragments, analogs and derivatives thereof and anti-idiotypic antibodies as described herein). The antibodies of the invention can be used to treat, inhibit or prevent diseases, disorders or conditions associated with aberrant expression and/or activity of a polypeptide of the invention, including, but not limited to, any one or more of the diseases, disorders, or conditions described herein. The treatment and/or prevention of diseases, disorders, or conditions associated with aberrant expression and/or activity of a polypeptide of the invention includes, but is not limited to, alleviating symptoms associated with those diseases, disorders or conditions. Antibodies of the invention may be provided in pharmaceutically acceptable compositions as known in the art or as described herein.

[0229] A summary of the ways in which the antibodies of the present invention may be used therapeutically includes binding polynucleotides or polypeptides of the present invention locally or systemically in the body or by direct cytotoxicity of the antibody, e.g. as mediated by complement (CDC) or by effector cells (ADCC). Some of these approaches are described in more detail below. Armed with the teachings provided herein, one of ordinary skill in the art will know how to use the antibodies of the present invention for diagnostic, monitoring or therapeutic purposes without undue experimentation.

[0230] The antibodies of this invention may be advantageously utilized in combination with other monoclonal or chimeric antibodies, or with lymphokines or hematopoietic growth factors (such as, e.g., IL-2, IL-3 and IL-7), for example, which serve to increase the number or activity of effector cells which interact with the antibodies.

[0231] The antibodies of the invention may be administered alone or in combination with other types of treatments (e.g., radiation therapy, chemotherapy, hormonal therapy, immunotherapy and anti-tumor agents). Generally, administration of products of a species origin or species reactivity (in the case of antibodies) that is the same species as that of the patient is preferred. Thus, in a preferred embodiment, human antibodies, fragments derivatives, analogs, or nucleic acids, are administered to a human patient for therapy or prophylaxis.

[0232] It is preferred to use high affinity and/or potent in vivo inhibiting and/or neutralizing antibodies against polypeptides or polynucleotides of the present invention, fragments or regions thereof, for both immunoassays directed to and therapy of disorders related to polynucleotides or polypeptides, including fragments thereof, of the present invention. Such antibodies, fragments, or regions, will preferably have an affinity for polynucleotides or polypeptides of the invention, including fragments thereof. Preferred binding affinities include those with a dissociation constant or Kd less than 5×10⁻² M, 10⁻² M, 5×10⁻³ M, 10⁻³ M, 5×10⁻⁴ M, 10⁻⁴ M, 5×10⁻⁵ M, 10⁻⁵ M, 5×10⁻⁶ M, 10⁻⁶ M, 5×10⁻⁷ M, 10⁻⁷ M, 5×10⁻⁸ M, 10⁻⁸ M, 5×10⁻⁹ M, 10⁻⁹ M, 5×10⁻¹⁰ M, 10⁻¹⁰ M, 5×10⁻¹¹ M, 10⁻¹¹ M, 5×10⁻¹² M, 10⁻¹² M, 5×10⁻¹³ M, 10⁻¹³ M, 5×10⁻¹⁴ M, 10⁻¹⁴ M, 5×10⁻¹⁵ M, and 10⁻¹⁵ M.

[0233] Gene Therapy

[0234] In a specific embodiment, nucleic acids comprising sequences encoding antibodies or functional derivatives thereof, are administered to treat, inhibit or prevent a disease or disorder associated with aberrant expression and/or activity of a polypeptide of the invention, by way of gene therapy. Gene therapy refers to therapy performed by the administration to a subject of an expressed or expressible nucleic acid. In this embodiment of the invention, the nucleic acids produce their encoded protein that mediates a therapeutic effect.

[0235] Any of the methods for gene therapy available in the art can be used according to the present invention. Exemplary methods are described below.

[0236] For general reviews of the methods of gene therapy, see Goldspiel et al., Clinical Pharmacy 12:488-505 (1993); Wu and Wu, Biotherapy 3:87-95 (1991); Tolstoshev, Ann. Rev. Pharmacol. Toxicol. 32:573-596 (1993); Mulligan, Science 260:926-932 (1993); and Morgan and Anderson, Ann. Rev. Biochem. 62:191-217 (1993); May, TIBTECH 11(5):155-215 (1993). Methods commonly known in the art of recombinant DNA technology which can be used are described in Ausubel et al. (eds.), Current Protocols in Molecular Biology, John Wiley & Sons, NY (1993); and Kriegler, Gene Transfer and Expression, A Laboratory Manual, Stockton Press, NY (1990).

[0237] In a preferred aspect, the compound comprises nucleic acid sequences encoding an antibody, said nucleic acid sequences being part of expression vectors that express the antibody or fragments or chimeric proteins or heavy or light chains thereof in a suitable host. In particular, such nucleic acid sequences have promoters operably linked to the antibody coding region, said promoter being inducible or constitutive, and, optionally, tissue-specific. In another particular embodiment, nucleic acid molecules are used in which the antibody coding sequences and any other desired sequences are flanked by regions that promote homologous recombination at a desired site in the genome, thus providing for intrachromosomal expression of the antibody encoding nucleic acids (Koller and Smithies, Proc. Natl. Acad. Sci. USA 86:8932-8935 (1989); Zijlstra et al., Nature 342:435-438 (1989). In specific embodiments, the expressed antibody molecule is a single chain antibody; alternatively, the nucleic acid sequences include sequences encoding both the heavy and light chains, or fragments thereof, of the antibody.

[0238] Delivery of the nucleic acids into a patient may be either direct, in which case the patient is directly exposed to the nucleic acid or nucleic acid-carrying vectors, or indirect, in which case, cells are first transformed with the nucleic acids in vitro, then transplanted into the patient. These two approaches are known, respectively, as in vivo or ex vivo gene therapy.

[0239] In a specific embodiment, the nucleic acid sequences are directly administered in vivo, where it is expressed to produce the encoded product. This can be accomplished by any of numerous methods known in the art, e.g., by constructing them as part of an appropriate nucleic acid expression vector and administering it so that they become intracellular, e.g., by infection using defective or attenuated retrovirals or other viral vectors (see U.S. Pat. No. 4,980,286), or by direct injection of naked DNA, or by use of microparticle bombardment (e.g., a gene gun; Biolistic, Dupont), or coating with lipids or cell-surface receptors or transfecting agents, encapsulation in liposomes, microparticles, or microcapsules, or by administering them in linkage to a peptide which is known to enter the nucleus, by administering it in linkage to a ligand subject to receptor-mediated endocytosis (see, e.g., Wu and Wu, J. Biol. Chem. 262:4429-4432 (1987)) (which can be used to target cell types specifically expressing the receptors), etc. In another embodiment, nucleic acid-ligand complexes can be formed in which the ligand comprises a fusogenic viral peptide to disrupt endosomes, allowing the nucleic acid to avoid lysosomal degradation. In yet another embodiment, the nucleic acid can be targeted in vivo for cell specific uptake and expression, by targeting a specific receptor (see, e.g., PCT Publications WO 92/06180; WO 92/22635; WO92/20316; WO93/14188, WO 93/20221). Alternatively, the nucleic acid can be introduced intracellularly and incorporated within host cell DNA for expression, by homologous recombination (Koller and Smithies, Proc. Natl. Acad. Sci. USA 86:8932-8935 (1989); Zijlstra et al., Nature 342:435-438 (1989)).

[0240] In a specific embodiment, viral vectors that contains nucleic acid sequences encoding an antibody of the invention are used. For example, a retroviral vector can be used (see Miller et al., Meth. Enzymol. 217:581-599 (1993)). These retroviral vectors contain the components necessary for the correct packaging of the viral genome and integration into the host cell DNA. The nucleic acid sequences encoding the antibody to be used in gene therapy are cloned into one or more vectors, which facilitates delivery of the gene into a patient. More detail about retroviral vectors can be found in Boesen et al., Biotherapy 6:291-302 (1994), which describes the use of a retroviral vector to deliver the mdr1 gene to hematopoietic stem cells in order to make the stem cells more resistant to chemotherapy. Other references illustrating the use of retroviral vectors in gene therapy are: Clowes et al., J. Clin. Invest. 93:644-651 (1994); Kiem et al., Blood 83:1467-1473 (1994); Salmons and Gunzberg, Human Gene Therapy 4:129-141 (1993); and Grossman and Wilson, Curr. Opin. in Genetics and Devel. 3:110-114 (1993).

[0241] Adenoviruses are other viral vectors that can be used in gene therapy. Adenoviruses are especially attractive vehicles for delivering genes to respiratory epithelia. Adenoviruses naturally infect respiratory epithelia where they cause a mild disease. Other targets for adenovirus-based delivery systems are liver, the central nervous system, endothelial cells, and muscle. Adenoviruses have the advantage of being capable of infecting non-dividing cells. Kozarsky and Wilson, Current Opinion in Genetics and Development 3:499-503 (1993) present a review of adenovirus-based gene therapy. Bout et al., Human Gene Therapy 5:3-10 (1994) demonstrated the use of adenovirus vectors to transfer genes to the respiratory epithelia of rhesus monkeys. Other instances of the use of adenoviruses in gene therapy can be found in Rosenfeld et al., Science 252:431-434 (1991); Rosenfeld et al., Cell 68:143-155 (1992); Mastrangeli et al., J. Clin. Invest. 91:225-234 (1993); PCT Publication WO94/12649; and Wang, et al., Gene Therapy 2:775-783 (1995). In a preferred embodiment, adenovirus vectors are used.

[0242] Adeno-associated virus (AAV) has also been proposed for use in gene therapy (Walsh et al., Proc. Soc. Exp. Biol. Med. 204:289-300 (1993); U.S. Pat. No. 5,436,146).

[0243] Another approach to gene therapy involves transferring a gene to cells in tissue culture by such methods as electroporation, lipofection, calcium phosphate mediated transfection, or viral infection. Usually, the method of transfer includes the transfer of a selectable marker to the cells. The cells are then placed under selection to isolate those cells that have taken up and are expressing the transferred gene. Those cells (are then delivered to a patient.

[0244] In this embodiment, the nucleic acid is introduced into a cell prior to administration in vivo of the resulting recombinant cell. Such introduction can be carried out by any method known in the art, including but not limited to transfection, electroporation, microinjection, infection with a viral or bacteriophage vector containing the nucleic acid sequences, cell fusion, chromosome-mediated gene transfer, microcell-mediated gene transfer, spheroplast fusion, etc. Numerous techniques are known in the art for the introduction of foreign genes into cells (see, e.g., Loeffler and Behr, Meth. Enzymol. 217:599-618 (1993); Cohen et al., Meth. Enzymol. 217:618-644 (1993); Cline, Pharmac. Ther. 29:69-92m (1985) and may be used in accordance with the present invention, provided that the necessary developmental and physiological functions of the recipient cells are not disrupted. The technique should provide for the stable transfer of the nucleic acid to the cell, so that the nucleic acid is expressible by the cell and preferably heritable and expressible by its cell progeny.

[0245] The resulting recombinant cells can be delivered to a patient by various methods known in the art. Recombinant blood cells (e.g., hematopoietic stem or progenitor cells) are preferably administered intravenously. The amount of cells envisioned for use depends on the desired effect, patient state, etc., and can be determined by one skilled in the art.

[0246] Cells into which a nucleic acid can be introduced for purposes of gene therapy encompass any desired, available cell type, and include but are not limited to epithelial cells, endothelial cells, keratinocytes, fibroblasts, muscle cells, hepatocytes; blood cells such as Tlymphocytes, Blymphocytes, monocytes, macrophages, neutrophils, eosinophils, megakaryocytes, granulocytes; various stem or progenitor cells, in particular hematopoietic stem or progenitor cells, e.g., as obtained from bone marrow, umbilical cord blood, peripheral blood, fetal liver, etc.

[0247] In a preferred embodiment, the cell used for gene therapy is autologous to the patient.

[0248] In an embodiment in which recombinant cells are used in gene therapy, nucleic acid sequences encoding an antibody are introduced into the cells such that they are expressible by the cells or their progeny, and the recombinant cells are then administered in vivo for therapeutic effect. In a specific embodiment, stem or progenitor cells are used. Any stem and/or progenitor cells which can be isolated and maintained in vitro can potentially be used in accordance with this embodiment of the present invention (see e.g. PCT Publication WO 94/08598; Stemple and Anderson, Cell 71:973-985 (1992); Rheinwald, Meth. Cell Bio. 21A:229 (1980); and Pittelkow and Scott, Mayo Clinic Proc. 61:771 (1986)).

[0249] In a specific embodiment, the nucleic acid to be introduced for purposes of gene therapy comprises an inducible promoter operably linked to the coding region, such that expression of the nucleic acid is controllable by controlling the presence or absence of the appropriate inducer of transcription. Demonstration of Therapeutic or Prophylactic Activity

[0250] The compounds or pharmaceutical compositions of the invention are preferably tested in vitro, and then in vivo for the desired therapeutic or prophylactic activity, prior to use in humans. For example, in vitro assays to demonstrate the therapeutic or prophylactic utility of a compound or pharmaceutical composition include, the effect of a compound on a cell line or a patient tissue sample. The effect of the compound or composition on the cell line and/or tissue sample can be determined utilizing techniques known to those of skill in the art including, but not limited to, rosette formation assays and cell lysis assays. In accordance with the invention, in vitro assays which can be used to determine whether administration of a specific compound is indicated, include in vitro cell culture assays in which a patient tissue sample is grown in culture, and exposed to or otherwise administered a compound, and the effect of such compound upon the tissue sample is observed.

[0251] Therapeutic/Prophylactic Administration and Composition

[0252] The invention provides methods of treatment, inhibition and prophylaxis by administration to a subject of an effective amount of a compound or pharmaceutical composition of the invention, preferably a polypeptide or antibody of the invention. In a preferred aspect, the compound is substantially purified (e.g., substantially free from substances that limit its effect or produce undesired side-effects). The subject is preferably an animal, including but not limited to animals such as cows, pigs, horses, chickens, cats, dogs, etc., and is preferably a mammal, and most preferably human.

[0253] Formulations and methods of administration that can be employed when the compound comprises a nucleic acid or an immunoglobulin are described above; additional appropriate formulations and routes of administration can be selected from among those described herein below.

[0254] Various delivery systems are known and can be used to administer a compound of the invention, e.g., encapsulation in liposomes, microparticles, microcapsules, recombinant cells capable of expressing the compound, receptor-mediated endocytosis (see, e.g., Wu and Wu, J. Biol. Chem. 262:4429-4432 (1987)), construction of a nucleic acid as part of a retroviral or other vector, etc. Methods of introduction include but are not limited to intradermal, intramuscular, intraperitoneal, intravenous, subcutaneous, intranasal, epidural, and oral routes. The compounds or compositions may be administered by any convenient route, for example by infusion or bolus injection, by absorption through epithelial or mucocutaneous linings (e.g., oral mucosa, rectal and intestinal mucosa, etc.) and may be administered together with other biologically active agents. Administration can be systemic or local. In addition, it may be desirable to introduce the pharmaceutical compounds or compositions of the invention into the central nervous system by any suitable route, including intraventricular and intrathecal injection; intraventricular injection may be facilitated by an intraventricular catheter, for example, attached to a reservoir, such as an Ommaya reservoir. Pulmonary administration can also be employed, e.g., by use of an inhaler or nebulizer, and formulation with an aerosolizing agent.

[0255] In a specific embodiment, it may be desirable to administer the pharmaceutical compounds or compositions of the invention locally to the area in need of treatment; this may be achieved by, for example, and not by way of limitation, local infusion during surgery, topical application, e.g., in conjunction with a wound dressing after surgery, by injection, by means of a catheter, by means of a suppository, or by means of an implant, said implant being of a porous, non-porous, or gelatinous material, including membranes, such as sialastic membranes, or fibers. Preferably, when administering a protein, including an antibody, of the invention, care must be taken to use materials to which the protein does not absorb.

[0256] In another embodiment, the compound or composition can be delivered in a vesicle, in particular a liposome (see Langer, Science 249:1527-1533 (1990); Treat et al., in Liposomes in the Therapy of Infectious Disease and Cancer, Lopez-Berestein and Fidler (eds.), Liss, New York, pp. 353-365 (1989); Lopez-Berestein, ibid., pp. 317-327; see generally ibid.)

[0257] In yet another embodiment, the compound or composition can be delivered in a controlled release system. In one embodiment, a pump may be used (see Langer, supra; Sefton, CRC Crit. Ref. Biomed. Eng. 14:201 (1987); Buchwald et al., Surgery 88:507 (1980); Saudek et al., N. Engl. J. Med. 321:574 (1989)). In another embodiment, polymeric materials can be used (see Medical Applications of Controlled Release, Langer and Wise (eds.), CRC Pres., Boca Raton, Fla. (1974); Controlled Drug Bioavailability, Drug Product Design and Performance, Smolen and Ball (eds.), Wiley, New York (1984); Ranger and Peppas, J., Macromol. Sci. Rev. Macromol. Chem. 23:61 (1983); see also Levy et al., Science 228:190 (1985); During et al., Ann. Neurol. 25:351 (1989); Howard et al., J. Neurosurg. 71:105 (1989)). In yet another embodiment, a controlled release system can be placed in proximity of the therapeutic target, i.e., the brain, thus requiring only a fraction of the systemic dose (see, e.g., Goodson, in Medical Applications of Controlled Release, supra, vol. 2, pp. 115-138 (1984)).

[0258] Other controlled release systems are discussed in the review by Langer (Science 249:1527-1533 (1990)).

[0259] In a specific embodiment where the compound of the invention is a nucleic acid encoding a protein, the nucleic acid can be administered in vivo to promote expression of its encoded protein, by constructing it as part of an appropriate nucleic acid expression vector and administering it so that it becomes intracellular, e.g., by use of a retroviral vector (see U.S. Pat. No. 4,980,286), or by direct injection, or by use of microparticle bombardment (e.g., a gene gun; Biolistic, Dupont), or coating with lipids or cell-surface receptors or transfecting agents, or by administering it in linkage to a homeobox-like peptide which is known to enter the nucleus (see e.g., Joliot et al., Proc. Natl. Acad. Sci. USA 88:1864-1868 (1991)), etc. Alternatively, a nucleic acid can be introduced intracellularly and incorporated within host cell DNA for expression, by homologous recombination.

[0260] The present invention also provides pharmaceutical compositions. Such compositions comprise a therapeutically effective amount of a compound, and a pharmaceutically acceptable carrier. In a specific embodiment, the term “pharmaceutically acceptable” means approved by a regulatory agency of the Federal or a state government or listed in the U.S. Pharmacopeia or other generally recognized pharmacopeia for use in animals, and more particularly in humans. The term “carrier” refers to a diluent, adjuvant, excipient, or vehicle with which the therapeutic is administered. Such pharmaceutical carriers can be sterile liquids, such as water and oils, including those of petroleum, animal, vegetable or synthetic origin, such as peanut oil, soybean oil, mineral oil, sesame oil and the like. Water is a preferred carrier when the pharmaceutical composition is administered intravenously. Saline solutions and aqueous dextrose and glycerol solutions can also be employed as liquid carriers, particularly for injectable solutions. Suitable pharmaceutical excipients include starch, glucose, lactose, sucrose, gelatin, malt, rice, flour, chalk, silica gel, sodium stearate, glycerol monostearate, talc, sodium chloride, dried skim milk, glycerol, propylene, glycol, water, ethanol and the like. The composition, if desired, can also contain minor amounts of wetting or emulsifying agents, or pH buffering agents. These compositions can take the form of solutions, suspensions, emulsion, tablets, pills, capsules, powders, sustained-release formulations and the like. The composition can be formulated as a suppository, with traditional binders and carriers such as triglycerides. Oral formulation can include standard carriers such as pharmaceutical grades of mannitol, lactose, starch, magnesium stearate, sodium saccharine, cellulose, magnesium carbonate, etc. Examples of suitable pharmaceutical carriers are described in “Remington's Pharmaceutical Sciences” by E. W. Martin. Such compositions will contain a therapeutically effective amount of the compound, preferably in purified form, together with a suitable amount of carrier so as to provide the form for proper administration to the patient. The formulation should suit the mode of administration.

[0261] In a preferred embodiment, the composition is formulated in accordance with routine procedures as a pharmaceutical composition adapted for intravenous administration to human beings. Typically, compositions for intravenous administration are solutions in sterile isotonic aqueous buffer. Where necessary, the composition may also include a solubilizing agent and a local anesthetic such as lignocaine to ease pain at the site of the injection. Generally, the ingredients are supplied either separately or mixed together in unit dosage form, for example, as a dry lyophilized powder or water free concentrate in a hermetically sealed container such as an ampoule or sachette indicating the quantity of active agent. Where the composition is to be administered by infusion, it can be dispensed with an infusion bottle containing sterile pharmaceutical grade water or saline. Where the composition is administered by injection, an ampoule of sterile water for injection or saline can be provided so that the ingredients may be mixed prior to administration.

[0262] The compounds of the invention can be formulated as neutral or salt forms. Pharmaceutically acceptable salts include those formed with anions such as those derived from hydrochloric, phosphoric, acetic, oxalic, tartaric acids, etc., and those formed with cations such as those derived from sodium, potassium, ammonium, calcium, ferric hydroxides, isopropylamine, triethylamine, 2-ethylamino ethanol, histidine, procaine, etc.

[0263] The amount of the compound of the invention which will be effective in the treatment, inhibition and prevention of a disease or disorder associated with aberrant expression and/or activity of a polypeptide of the invention can be determined by standard clinical techniques. In addition, in vitro assays may optionally be employed to help identify optimal dosage ranges. The precise dose to be employed in the formulation will also depend on the route of administration, and the seriousness of the disease or disorder, and should be decided according to the judgment of the practitioner and each patient's circumstances. Effective doses may be extrapolated from dose-response curves derived from in vitro or animal model test systems.

[0264] For antibodies, the dosage administered to a patient is typically 0.1 mg/kg to 100 mg/kg of the patient's body weight. Preferably, the dosage administered to a patient is between 0.1 mg/kg and 20 mg/kg of the patient's body weight, more preferably 1 mg/kg to 10 mg/kg of the patient's body weight. Generally, human antibodies have a longer half-life within the human body than antibodies from other species due to the immune response to the foreign polypeptides. Thus, lower dosages of human antibodies and less frequent administration is often possible. Further, the dosage and frequency of administration of antibodies of the invention may be reduced by enhancing uptake and tissue penetration (e.g., into the brain) of the antibodies by modifications such as, for example, lipidation.

[0265] The invention also provides a pharmaceutical pack or kit comprising one or more containers filled with one or more of the ingredients of the pharmaceutical compositions of the invention. Optionally associated with such container(s) can be a notice in the form prescribed by a governmental agency regulating the manufacture, use or sale of pharmaceuticals or biological products, which notice reflects approval by the agency of manufacture, use or sale for human administration.

[0266] Diagnosis and Imaging

[0267] Labeled antibodies, and derivatives and analogs thereof, which specifically bind to a polypeptide of interest can be used for diagnostic purposes to detect, diagnose, or monitor diseases, disorders, and/or conditions associated with the aberrant expression and/or activity of a polypeptide of the invention. The invention provides for the detection of aberrant expression of a polypeptide of interest, comprising (a) assaying the expression of the polypeptide of interest in cells or body fluid of an individual using one or more antibodies specific to the polypeptide interest and (b) comparing the level of gene expression with a standard gene expression level, whereby an increase or decrease in the assayed polypeptide gene expression level compared to the standard expression level is indicative of aberrant expression.

[0268] The invention provides a diagnostic assay for diagnosing a disorder, comprising (a) assaying the expression of the polypeptide of interest in cells or body fluid of an individual using one or more antibodies specific to the polypeptide interest and (b) comparing the level of gene expression with a standard gene expression level, whereby an increase or decrease in the assayed polypeptide gene expression level compared to the standard expression level is indicative of a particular disorder. With respect to cancer, the presence of a relatively high amount of transcript in biopsied tissue from an individual may indicate a predisposition for the development of the disease, or may provide a means for detecting the disease prior to the appearance of actual clinical symptoms. A more definitive diagnosis of this type may allow health professionals to employ preventative measures or aggressive treatment earlier thereby preventing the development or further progression of the cancer.

[0269] Antibodies of the invention can be used to assay protein levels in a biological sample using classical immunohistological methods known to those of skill in the art (e.g., see Jalkanen, et al., J. Cell. Biol. 101:976-985 (1985); Jalkanen, et al., J. Cell. Biol. 105:3087-3096 (1987)). Other antibody-based methods useful for detecting protein gene expression include immunoassays, such as the enzyme linked immunosorbent assay (ELISA) and the radioimmunoassay (RIA). Suitable antibody assay labels are known in the art and include enzyme labels, such as, glucose oxidase; radioisotopes, such as iodine (125I, 121I), carbon (14C), sulfur (35S), tritium (3H), indium (112In), and technetium (99Tc); luminescent labels, such as luminol; and fluorescent labels, such as fluorescein and rhodamine, and biotin.

[0270] One aspect of the invention is the detection and diagnosis of a disease or disorder associated with aberrant expression of a polypeptide of interest in an animal, preferably a mammal and most preferably a human. In one embodiment, diagnosis comprises: a) administering (for example, parenterally, subcutaneously, or intraperitoneally) to a subject an effective amount of a labeled molecule which specifically binds to the polypeptide of interest; b) waiting for a time interval following the administering for permitting the labeled molecule to preferentially concentrate at sites in the subject where the polypeptide is expressed (and for unbound labeled molecule to be cleared to background level); c) determining background level; and d) detecting the labeled molecule in the subject, such that detection of labeled molecule above the background level indicates that the subject has a particular disease or disorder associated with aberrant expression of the polypeptide of interest. Background level can be determined by various methods including, comparing the amount of labeled molecule detected to a standard value previously determined for a particular system.

[0271] It will be understood in the art that the size of the subject and the imaging system used will determine the quantity of imaging moiety needed to produce diagnostic images. In the case of a radioisotope moiety, for a human subject, the quantity of radioactivity injected will normally range from about 5 to 20 millicuries of 99mTc. The labeled antibody or antibody fragment will then preferentially accumulate at the location of cells which contain the specific protein. In vivo tumor imaging is described in S. W. Burchiel et al., “Immunopharmacokinetics of Radiolabeled Antibodies and Their Fragments.” (Chapter 13 in Tumor Imaging: The Radiochemical Detection of Cancer, S. W. Burchiel and B. A. Rhodes, eds., Masson Publishing Inc. (1982).

[0272] Depending on several variables, including the type of label used and the mode of administration, the time interval following the administration for permitting the labeled molecule to preferentially concentrate at sites in the subject and for unbound labeled molecule to be cleared to background level is 6 to 48 hours or 6 to 24 hours or 6 to 12 hours. In another embodiment the time interval following administration is 5 to 20 days or 5 to 10 days.

[0273] In an embodiment, monitoring of the disease or disorder is carried out by repeating the method for diagnosing the disease or disease, for example, one month after initial diagnosis, six months after initial diagnosis, one year after initial diagnosis, etc.

[0274] Presence of the labeled molecule can be detected in the patient using methods known in the art for in vivo scanning. These methods depend upon the type of label used. Skilled artisans will be able to determine the appropriate method for detecting a particular label. Methods and devices that may be used in the diagnostic methods of the invention include, but are not limited to, computed tomography (CT), whole body scan such as position emission tomography (PET), magnetic resonance imaging (MRI), and sonography.

[0275] In a specific embodiment, the molecule is labeled with a radioisotope and is detected in the patient using a radiation responsive surgical instrument (Thurston et al., U.S. Pat. No. 5,441,050). In another embodiment, the molecule is labeled with a fluorescent compound and is detected in the patient using a fluorescence responsive scanning instrument. In another embodiment, the molecule is labeled with a positron emitting metal and is detected in the patent using positron emission-tomography. In yet another embodiment, the molecule is labeled with a paramagnetic label and is detected in a patient using magnetic resonance imaging (MRI).

[0276] Kits

[0277] The present invention provides kits that can be used in the above methods. In one embodiment, a kit comprises an antibody of the invention, preferably a purified antibody, in one or more containers. In a specific embodiment, the kits of the present invention contain a substantially isolated polypeptide comprising an epitope which is specifically immunoreactive with an antibody included in the kit. Preferably, the kits of the present invention further comprise a control antibody which does not react with the polypeptide of interest. In another specific embodiment, the kits of the present invention contain a means for detecting the binding of an antibody to a polypeptide of interest (e.g., the antibody may be conjugated to a detectable substrate such as a fluorescent compound, an enzymatic substrate, a radioactive compound or a luminescent compound, or a second antibody which recognizes the first antibody may be conjugated to a detectable substrate).

[0278] In another specific embodiment of the present invention, the kit is a diagnostic kit for use in screening serum containing antibodies specific against proliferative and/or cancerous polynucleotides and polypeptides. Such a kit may include a control antibody that does not react with the polypeptide of interest. Such a kit may include a substantially isolated polypeptide antigen comprising an epitope which is specifically immunoreactive with at least one anti-polypeptide antigen antibody. Further, such a kit includes means for detecting the binding of said antibody to the antigen (e.g., the antibody may be conjugated to a fluorescent compound such as fluorescein or rhodamine which can be detected by flow cytometry). In specific embodiments, the kit may include a recombinantly produced or chemically synthesized polypeptide antigen. The polypeptide antigen of the kit may also be attached to a solid support.

[0279] In a more specific embodiment the detecting means of the above-described kit includes a solid support to which said polypeptide antigen is attached. Such a kit may also include a non-attached reporter-labeled anti-human antibody. In this embodiment, binding of the antibody to the polypeptide antigen can be detected by binding of the said reporter-labeled antibody.

[0280] In an additional embodiment, the invention includes a diagnostic kit for use in screening serum containing antigens of the polypeptide of the invention. The diagnostic kit includes a substantially isolated antibody specifically immunoreactive with polypeptide or polynucleotide antigens, and means for detecting the binding of the polynucleotide or polypeptide antigen to the antibody. In one embodiment, the antibody is attached to a solid support. In a specific embodiment, the antibody may be a monoclonal antibody. The detecting means of the kit may include a second, labeled monoclonal antibody. Alternatively, or in addition, the detecting means may include a labeled, competing antigen.

[0281] In one diagnostic configuration, test serum is reacted with a solid phase reagent having a surface-bound antigen obtained by the methods of the present invention. After binding with specific antigen antibody to the reagent and removing unbound serum components by washing, the reagent is reacted with reporter-labeled anti-human antibody to bind reporter to the reagent in proportion to the amount of bound anti-antigen antibody on the solid support. The reagent is again washed to remove unbound labeled antibody, and the amount of reporter associated with the reagent is determined. Typically, the reporter is an enzyme which is detected by incubating the solid phase in the presence of a suitable fluorometric, luminescent or colorimetric substrate (Sigma, St. Louis, Mo.).

[0282] The solid surface reagent in the above assay is prepared by known techniques for attaching protein material to solid support material, such as polymeric beads, dip sticks, 96-well plate or filter material. These attachment methods generally include non-specific adsorption of the protein to the support or covalent attachment of the protein, typically through a free amine group, to a chemically reactive group on the solid support, such as an activated carboxyl, hydroxyl, or aldehyde group. Alternatively, streptavidin coated plates can be used in conjunction with biotinylated antigen(s).

[0283] Thus, the invention provides an assay system or kit for carrying out this diagnostic method. The kit generally includes a support with surface-bound recombinant antigens, and a reporter-labeled anti-human antibody for detecting surface-bound anti-antigen antibody.

[0284] Uses of the Polynucleotides

[0285] Each of the polynucleotides identified herein can be used in numerous ways as reagents. The following description should be considered exemplary and utilizes known techniques.

[0286] The pancreatic cancer antigen polynucleotides of the present invention are useful for chromosome identification. There exists an ongoing need to identify new chromosome markers, since few chromosome marking reagents, based on actual sequence data (repeat polymorphisms), are presently available. Each sequence is specifically targeted to and can hybridize with a particular location on an individual human chromosome, thus each polynucleotide of the present invention can routinely be used as a chromosome marker using techniques known in the art.

[0287] Briefly, sequences can be mapped to chromosomes by preparing PCR primers (preferably at least 15 bp (e.g., 15-25 bp) from the sequences shown in SEQ ID NO:X, or the complement thereto. Primers can optionally be selected using computer analysis so that primers do not span more than one predicted exon in the genomic DNA. These primers are then used for PCR screening of somatic cell hybrids containing individual human chromosomes. Only those hybrids containing the human gene corresponding to SEQ ID NO:X will yield an amplified fragment.

[0288] Similarly, somatic hybrids provide a rapid method of PCR mapping the polynucleotides to particular chromosomes. Three or more clones can be assigned per day using a single thermal cycler. Moreover, sublocalization of the polynucleotides can be achieved with panels of specific chromosome fragments. Other gene mapping strategies that can be used include in situ hybridization, prescreening with labeled flow-sorted chromosomes, preselection by hybridization to construct chromosome specific-cDNA libraries, and computer mapping techniques (See, e.g., Shuler, Trends Biotechnol 16:456-459 (1998) which is hereby incorporated by reference in its entirety).

[0289] Precise chromosomal location of the polynucleotides can also be achieved using fluorescence in situ hybridization (FISH) of a metaphase chromosomal spread. This technique uses polynucleotides as short as 500 or 600 bases; however, polynucleotides 2,000-4,000 bp are preferred. For a review of this technique, see Verma et al., “Human Chromosomes: a Manual of Basic Techniques,” Pergamon Press, New York (1988).

[0290] For chromosome mapping, the polynucleotides can be used individually (to mark a single chromosome or a single site on that chromosome) or in panels (for marking multiple sites and/or multiple chromosomes).

[0291] Thus, the present invention also provides a method for chromosomal localization which involves (a) preparing PCR primers from the polynucleotide sequences in Table 3 and SEQ ID NO:X and (b) screening somatic cell hybrids containing individual chromosomes.

[0292] The polynucleotides of the present invention would likewise be useful for radiation hybrid mapping, HAPPY mapping, and long range restriction mapping. For a review of these techniques and others known in the art, see, e.g. Dear, “Genome Mapping: A Practical Approach,” IRL Press at Oxford University Press, London (1997); Aydin, J. Mol. Med. 77:691-694 (1999); Hacia et al., Mol. Psychiatry 3:483-492 (1998); Herrick et al., Chromosome Res. 7:409-423 (1999); Hamilton et al., Methods Cell Biol. 62:265-280 (2000); and/or Ott, J. Hered. 90:68-70 (1999) each of which is hereby incorporated by reference in its entirety.

[0293] Once a polynucleotide has been mapped to a precise chromosomal location, the physical position of the polynucleotide can be used in linkage analysis. Linkage analysis establishes coinheritance between a chromosomal location and presentation of a particular disease. (Disease mapping data are found, for example, in V. McKusick, Mendelian Inheritance in Man (available on line through Johns Hopkins University Welch Medical Library).) Assuming 1 megabase mapping resolution and one gene per 20 kb, a cDNA precisely localized to a chromosomal region associated with the disease could be one of 50-500 potential causative genes.

[0294] Thus, once coinheritance is established, differences in a polynucleotide of the invention and the corresponding gene between affected and unaffected individuals can be examined. First, visible structural alterations in the chromosomes, such as deletions or translocations, are examined in chromosome spreads or by PCR. If no structural alterations exist, the presence of point mutations are ascertained. Mutations observed in some or all affected individuals, but not in normal individuals, indicates that the mutation may cause the disease. However, complete sequencing of the polypeptide and the corresponding gene from several normal individuals is required to distinguish the mutation from a polymorphism. If a new polymorphism is identified, this polymorphic polypeptide can be used for further linkage analysis.

[0295] Furthermore, increased or decreased expression of the gene in affected individuals as compared to unaffected individuals can be assessed using the polynucleotides of the invention. Any of these alterations (altered expression, chromosomal rearrangement, or mutation) can be used as a diagnostic or prognostic marker.

[0296] Thus, the invention provides a method of detecting increased or decreased expression levels of the pancreatic cancer polynucleotides in affected individuals as compared to unaffected individuals using polynucleotides of the present invention and techniques known in the art, including but not limited to the method described in Example 11. Any of these alterations (altered expression, chromosomal rearrangement, or mutation) can be used as a diagnostic or prognostic marker.

[0297] Thus, the invention also provides a diagnostic method useful during diagnosis of a pancreas related disorder, including pancreas cancer, involving measuring the expression level of pancreatic cancer polynucleotides in pancreatic tissue or other cells or body fluid from an individual and comparing the measured gene expression level with a standard pancreatic cancer polynucleotide expression level, whereby an increase or decrease in the gene expression level compared to the standard is indicative of a pancreas related disorder.

[0298] In still another embodiment, the invention includes a kit for analyzing samples for the presence of proliferative and/or cancerous polynucleotides derived from a test subject. In a general embodiment, the kit includes at least one polynucleotide probe containing a nucleotide sequence that will specifically hybridize with a polynucleotide of the invention and a suitable container. In a specific embodiment, the kit includes two polynucleotide probes defining an internal region of the polynucleotide of the invention, where each probe has one strand containing a 31′ mer-end internal to the region. In a further embodiment, the probes may be useful as primers for polymerase chain reaction amplification.

[0299] Where a diagnosis of a pancreas related disorder, including, for example, diagnosis of a tumor, has already been made according to conventional methods, the present invention is useful as a prognostic indicator, whereby patients exhibiting enhanced or depressed pancreatic cancer polynucleotide expression will experience a worse clinical outcome relative to patients expressing the gene at a level nearer the standard level.

[0300] By “measuring the expression level of pancreatic cancer polynucleotides” is intended qualitatively or quantitatively measuring or estimating the level of the pancreatic cancer polypeptide or the level of the mRNA encoding the pancreatic cancer polypeptide in a first biological sample either directly (e.g., by determining or estimating absolute protein level or mRNA level) or relatively (e.g., by comparing to the pancreatic cancer polypeptide level or mRNA level in a second biological sample). Preferably, the pancreatic cancer polypeptide level or mRNA level in the first biological sample is measured or estimated and compared to a standard pancreatic cancer polypeptide level or mRNA level, the standard being taken from a second biological sample obtained from an individual not having the pancreas related disorder or being determined by averaging levels from a population of individuals not having a pancreas related disorder. As will be appreciated in the art, once a standard pancreatic cancer polypeptide level or mRNA level is known, it can be used repeatedly as a standard for comparison.

[0301] By “biological sample” is intended any biological sample obtained from an individual, body fluid, cell line, tissue culture, or other source which contains pancreatic cancer polypeptide or the corresponding mRNA. As indicated, biological samples include body fluids (such as bile, lymph, sera, plasma, urine, synovial fluid and spinal fluid) which contain the pancreatic cancer polypeptide, pancreas tissue, and other tissue sources found to express the pancreatic cancer polypeptide. Methods for obtaining tissue biopsies and body fluids from mammals are well known in the art. Where the biological sample is to include mRNA, a tissue biopsy is the preferred source.

[0302] The method(s) provided above may preferably be applied in a diagnostic method and/or kits in which polynucleotides and/or polypeptides of the invention are attached to a solid support. In one exemplary method, the support may be a “gene chip” or a “biological chip” as described in U.S. Pat. Nos. 5,837,832, 5,874,219, and 5,856,174. Further, such a gene chip with pancreatic cancer polynucleotides attached may be used to identify polymorphisms between the pancreatic cancer polynucleotide sequences, with polynucleotides isolated from a test subject. The knowledge of such polymorphisms (i.e. their location, as well as, their existence) would be beneficial in identifying disease loci for many disorders, such as for example, in neural disorders, immune system disorders, muscular disorders, reproductive disorders, gastrointestinal disorders, pulmonary disorders, cardiovascular disorders, renal disorders, proliferative disorders, and/or cancerous diseases and conditions, though most preferably in pancreas related proliferative, and/or cancerous diseases and conditions. Such a method is described in U.S. Pat. Nos. 5,858,659 and 5,856,104. The U.S. Patents referenced supra are hereby incorporated by reference in their entirety herein.

[0303] The present invention encompasses pancreatic cancer polynucleotides that are chemically synthesized, or reproduced as peptide nucleic acids (PNA), or according to other methods known in the art. The use of PNAs would serve as the preferred form if the polynucleotides of the invention are incorporated onto a solid support, or gene chip. For the purposes of the present invention, a peptide nucleic acid (PNA) is a polyamide type of DNA analog and the monomeric units for adenine, guanine, thymine and cytosine are available commercially (Perceptive Biosystems). Certain components of DNA, such as phosphorus, phosphorus oxides, or deoxyribose derivatives, are not present in PNAs. As disclosed by P. E. Nielsen, M. Egholm, R. H. Berg and O. Buchardt, Science 254, 1497 (1991); and M. Egholm, O. Buchardt, L. Christensen, C. Behrens, S. M. Freier, D. A. Driver, R. H. Berg, S. K. Kim, B. Norden, and P. E. Nielsen, Nature 365, 666 (1993), PNAs bind specifically and tightly to complementary DNA strands and are not degraded by nucleases. In fact, PNA binds more strongly to DNA than DNA itself does. This is probably because there is no electrostatic repulsion between the two strands, and also the polyamide backbone is more flexible. Because of this, PNA/DNA duplexes bind under a wider range of stringency conditions than DNA/DNA duplexes, making it easier to perform multiplex hybridization. Smaller probes can be used than with DNA due to the strong binding. In addition, it is more likely that single base mismatches can be determined with PNA/DNA hybridization because a single mismatch in a PNA/DNA 15-mer lowers the melting point (T.sub.m) by 8°-20° C., vs. 4°-16° C. for the DNA/DNA 15-mer duplex. Also, the absence of charge groups in PNA means that hybridization can be done at low ionic strengths and reduce possible interference by salt during the analysis.

[0304] The present invention have uses which include, but are not limited to, detecting cancer in mammals. In particular the invention is useful during diagnosis of pathological cell proliferative neoplasias which include, but are not limited to: acute myelogenous leukemias including acute monocytic leukemia, acute myeloblastic leukemia, acute promyelocytic leukemia, acute myelomonocytic leukemia, acute erythroleukemia, acute megakaryocytic leukemia, and acute undifferentiated leukemia, etc.; and chronic myelogenous leukemias including chronic myelomonocytic leukemia, chronic granulocytic leukemia, etc. Preferred mammals include monkeys, apes, cats, dogs, cows, pigs, horses, rabbits and humans. Particularly preferred are humans.

[0305] Pathological cell proliferative disorders are often associated with inappropriate activation of proto-oncogenes. (Gelmann, E. P. et al., “The Etiology of Acute Leukemia: Molecular Genetics and Viral Oncology,” in Neoplastic Diseases of the Blood, Vol 1., Wiernik, P. H. et al. eds., 161-182 (1985)). Neoplasias are now believed to result from the qualitative alteration of a normal cellular gene product, or from the quantitative modification of gene expression by insertion into the chromosome of a viral sequence, by chromosomal translocation of a gene to a more actively transcribed region, or by some other mechanism. (Gelmann et al., supra) It is likely that mutated or altered expression of specific genes is involved in the pathogenesis of some leukemias, among other tissues and cell types. (Gelmann et al., supra) Indeed, the human counterparts of the oncogenes involved in some animal neoplasias have been amplified or translocated in some cases of human leukemia and carcinoma. (Gelmann et al., supra)

[0306] For example, c-myc expression is highly amplified in the non-lymphocytic leukemia cell line HL-60. When HL-60 cells are chemically induced to stop proliferation, the level of c-myc is found to be downregulated. (International Publication Number WO 91/15580). However, it has been shown that exposure of HL-60 cells to a DNA construct that is complementary to the 5′ end of c-myc or c-myb blocks translation of the corresponding mRNAs which downregulates expression of the c-myc or c-myb proteins and causes arrest of cell proliferation and differentiation of the treated cells. (International Publication Number WO 91/15580; Wickstrom et al., Proc. Natl. Acad. Sci. 85:1028 (1988); Anfossi et al., Proc. Natl. Acad. Sci. 86:3379 (1989)). However, the skilled artisan would appreciate the present invention's usefulness is not limited to treatment of proliferative disorders of hematopoietic cells and tissues, in light of the numerous cells and cell types of varying origins which are known to exhibit proliferative phenotypes.

[0307] In addition to the foregoing, a pancreatic cancer antigen polynucleotide can be used to control gene expression through triple helix formation or through antisense DNA or RNA. Antisense techniques are discussed, for example, in Okano, J. Neurochem. 56: 560 (1991); Oligodeoxynucleotides as Antisense Inhibitors of Gene Expression, CRC Press, Boca Raton, Fla. (1988). Triple helix formation is discussed in, for instance Lee et al., Nucleic Acids Research 6: 3073 (1979); Cooney et al., Science 241: 456 (1988); and Dervan et al., Science 251: 1360 (1991). Both methods rely on binding of the polynucleotide to a complementary DNA or RNA. For these techniques, preferred polynucleotides are usually oligonucleotides 20 to 40 bases in length and complementary to either the region of the gene involved in transcription (triple helix—see Lee et al., Nucl. Acids Res. 6:3073 (1979); Cooney et al., Science 241:456 (1988); and Dervan et al., Science 251:1360 (1991) ) or to the mRNA itself (antisense—Okano, J. Neurochem. 56:560 (1991); Oligodeoxy-nucleotides as Antisense Inhibitors of Gene Expression, CRC Press, Boca Raton, Fla. (1988).) Triple helix formation optimally results in a shut-off of RNA transcription from DNA, while antisense RNA hybridization blocks translation of an mRNA molecule into polypeptide. The oligonucleotide described above can also be delivered to cells such that the antisense RNA or DNA may be expressed in vivo to inhibit production of polypeptide of the present invention antigens. Both techniques are effective in model systems, and the information disclosed herein can be used to design antisense or triple helix polynucleotides in an effort to treat disease, and in particular, for the treatment of proliferative diseases and/or conditions.

[0308] Polynucleotides of the present invention are also useful in gene therapy. One goal of gene therapy is to insert a normal gene into an organism having a defective gene, in an effort to correct the genetic defect. The polynucleotides disclosed in the present invention offer a means of targeting such genetic defects in a highly accurate manner. Another goal is to insert a new gene that was not present in the host genome, thereby producing a new trait in the host cell.

[0309] The polynucleotides are also useful for identifying individuals from minute biological samples. The United States military, for example, is considering the use of restriction fragment length polymorphism (RFLP) for identification of its personnel. In this technique, an individual's genomic DNA is digested with one or more restriction enzymes, and probed on a Southern blot to yield unique bands for identifying personnel. This method does not suffer from the current limitations of “Dog Tags” which can be lost, switched, or stolen, making positive identification difficult. The polynucleotides of the present invention can be used as additional DNA markers for RFLP.

[0310] The polynucleotides of the present invention can also be used as an alternative to RFLP, by determining the actual base-by-base DNA sequence of selected portions of an individual's genome. These sequences can be used to prepare PCR primers for amplifying and isolating such selected DNA, which can then be sequenced. Using this technique, individuals can be identified because each individual will have a unique set of DNA sequences. Once an unique ID database is established for an individual, positive identification of that individual, living or dead, can be made from extremely small tissue samples.

[0311] Forensic biology also benefits from using DNA-based identification techniques as disclosed herein. DNA sequences taken from very small biological samples such as tissues, e.g., hair or skin, or body fluids, e.g., blood, saliva, semen, synovial fluid, amniotic fluid, breast milk, lymph, pulmonary sputum or surfactant, urine, fecal matter, etc., can be amplified using PCR. In one prior art technique, gene sequences amplified from polymorphic loci, such as DQa class II HLA gene, are used in forensic biology to identify individuals. (Erlich, H., PCR Technology, Freeman and Co. (1992).) Once these specific polymorphic loci are amplified, they are digested with one or more restriction enzymes, yielding an identifying set of bands on a Southern blot probed with DNA corresponding to the DQa class II HLA gene. Similarly, polynucleotides of the present invention can be used as polymorphic markers for forensic purposes.

[0312] There is also a need for reagents capable of identifying the source of a particular tissue. Such need arises, for example, in forensics when presented with tissue of unknown origin. Appropriate reagents can comprise, for example, DNA probes or primers specific to pancreas or pancreatic cancer polynucleotides prepared from the sequences of the present invention. Panels of such reagents can identify tissue by species and/or by organ type. In a similar fashion, these reagents can be used to screen tissue cultures for contamination.

[0313] The polynucleotides of the present invention are also useful as hybridization probes for differential identification of the tissue(s) or cell type(s) present in a biological sample. Similarly, polypeptides and antibodies directed to polypeptides of the present invention are useful to provide immunological probes for differential identification of the tissue(s) (e.g., immunohistochemistry assays) or cell type(s) (e.g., immunocytochemistry assays). In addition, for a number of disorders of the above tissues or cells, significantly higher or lower levels of gene expression of the polynucleotides/polypeptides of the present invention may be detected in certain tissues (e.g., tissues expressing polypeptides and/or polynucleotides of the present invention, pancreas and pancreatic cancer tissues and/or cancerous and/or wounded tissues) or bodily fluids (e.g., serum, plasma, urine, synovial fluid or spinal fluid) taken from an individual having such a disorder, relative to a “standard” gene expression level, i.e., the expression level in healthy tissue from an individual not having the disorder.

[0314] Thus, the invention provides a diagnostic method of a disorder, which involves: (a) assaying gene expression level in cells or body fluid of an individual; (b) comparing the gene expression level with a standard gene expression level, whereby an increase or decrease in the assayed gene expression level compared to the standard expression level is indicative of a disorder.

[0315] In the very least, the polynucleotides of the present invention can be used as molecular weight markers on Southern gels, as diagnostic probes for the presence of a specific mRNA in a particular cell type, as a probe to “subtract-out” known sequences in the process of discovering novel polynucleotides, for selecting and making oligomers for attachment to a “gene chip” or other support, to raise anti-DNA antibodies using DNA immunization techniques, and as an antigen to elicit an immune response.

[0316] Uses of the Polypeptides

[0317] Each of the polypeptides identified herein can be used in numerous ways. The following description should be considered exemplary and utilizes known techniques.

[0318] Polypeptides and antibodies directed to polypeptides of the present invention are useful to provide immunological probes for differential identification of the tissue(s) (e.g., immunohistochemistry assays such as, for example, ABC immunoperoxidase (Hsu et al., J. Histochem. Cytochem. 29:577-580 (1981)) or cell type(s) (e.g., immunocytochemistry assays).

[0319] Antibodies can be used to assay levels of polypeptides encoded by polynucleotides of the invention in a biological sample using classical immunohistological methods known to those of skill in the art (e.g., see Jalkanen, et al., J. Cell. Biol. 101:976-985 (1985); Jalkanen, et al., J. Cell. Biol. 105:3087-3096 (1987)). Other antibody-based methods useful for detecting protein gene expression include immunoassays, such as the enzyme linked immunosorbent assay (ELISA) and the radioimmunoassay (RIA). Suitable antibody assay labels are known in the art and include enzyme labels, such as, glucose oxidase; radioisotopes, such as iodine (¹³¹I, ¹²⁵I, ¹²³I, ¹²¹I), carbon (¹⁴C), sulfur (³⁵S), tritium (³H), indium (^{115m}In, ^{113m}In, ¹¹²In, ¹¹¹In), and technetium (⁹⁹Tc, ^{99m}Tc), thallium (²⁰¹Ti), gallium (⁶⁸Ga, ⁶⁷Ga), palladium (¹⁰³Pd), molybdenum (⁹⁹Mo), xenon (¹³³Xe), fluorine (¹⁸F) ¹⁵³Sm, ¹⁷⁷Lu, ¹⁵⁹Gd, ¹⁴⁹Pm, ¹⁴⁰La, ¹⁷⁵Yb, ¹⁶⁶Ho, ⁹⁰Y, ⁴⁷Sc, ¹⁸⁶Re, ¹⁸⁸Re, ¹⁴²Pr, ¹⁰⁵Rh, ⁹⁷Ru; luminescent labels, such as luminol; and fluorescent labels, such as fluorescein and rhodamine, and biotin.

[0320] In addition to assaying levels of polypeptide of the present invention in a biological sample, proteins can also be detected in vivo by imaging. Antibody labels or markers for in vivo imaging of protein include those detectable by X-radiography, NMR or ESR. For X-radiography, suitable labels include radioisotopes such as barium or cesium, which emit detectable radiation but are not overtly harmful to the subject. Suitable markers for NMR and ESR include those with a detectable characteristic spin, such as deuterium, which may be incorporated into the antibody by labeling of nutrients for the relevant hybridoma.

[0321] A protein-specific antibody or antibody fragment which has been labeled with an appropriate detectable imaging moiety, such as a radioisotope (for example, ¹³¹I, ¹¹²In, ^{99m}Tc, (¹³¹I, ¹²⁵I, ¹²³I, ¹²¹I), carbon (¹⁴C), sulfur (³⁵S), tritium (³H), indium (^{115m}In, ^{113m}In, ¹¹²In, ¹¹¹In), and technetium (⁹⁹Tc, ^{99m}Tc), thallium (²⁰¹Ti), gallium (⁶⁸Ga, ⁶⁷Ga), palladium (¹⁰³Pd), molybdenum (⁹⁹Mo), xenon (¹³³Xe), fluorine (¹⁸F, ¹⁵³Sm, ¹⁷⁷Lu, ¹⁵⁹Gd, ¹⁴⁹Pm, ¹⁴⁰La, ¹⁷⁵Yb, ¹⁶⁶Ho, ⁹⁰Y, ⁴⁷Sc, ¹⁸⁶Re, ¹⁸⁸Re, ¹⁴²Pr, ¹⁰⁵Rh, ⁹⁷Ru), a radio-opaque substance, or a material detectable by nuclear magnetic resonance, is introduced (for example, parenterally, subcutaneously or intraperitoneally) into the mammal to be examined for immune system disorder. It will be understood in the art that the size of the subject and the imaging system used will determine the quantity of imaging moiety needed to produce diagnostic images. In the case of a radioisotope moiety, for a human subject, the quantity of radioactivity injected will normally range from about 5 to 20 millicuries of ^{99m}Tc. The labeled antibody or antibody fragment will then preferentially accumulate at the location of cells which express the polypeptide encoded by a polynucleotide of the invention. In vivo tumor imaging is described in S. W. Burchiel et al., “Immunopharmacokinetics of Radiolabeled Antibodies and Their Fragments” (Chapter 13 in Tumor Imaging: The Radiochemical Detection of Cancer, S. W. Burchiel and B. A. Rhodes, eds., Masson Publishing Inc. (1982)).

[0322] In one embodiment, the invention provides a method for the specific delivery of compositions of the invention to cells by administering polypeptides of the invention (e.g., polypeptides encoded by polynucleotides of the invention and/or antibodies) that are associated with heterologous polypeptides or nucleic acids. In one example, the invention provides a method for delivering a therapeutic protein into the targeted cell. In another example, the invention provides a method for delivering a single stranded nucleic acid (e.g., antisense or ribozymes) or double stranded nucleic acid (e.g., DNA that can integrate into the cell's genome or replicate episomally and that can be transcribed) into the targeted cell.

[0323] In another embodiment, the invention provides a method for the specific destruction of cells (e.g., the destruction of tumor cells) by administering polypeptides of the invention in association with toxins or cytotoxic prodrugs.

[0324] In a preferred embodiment, the invention provides a method for the specific destruction of pancreatic cells (e.g., aberrant pancreatic cells, pancreatic neoplasm) by administering polypeptides of the invention (e.g., polypeptides encoded by polynucleotides of the invention and/or antibodies) in association with toxins or cytotoxic prodrugs.

[0325] By “toxin” is meant one or more compounds that bind and activate endogenous cytotoxic effector systems, radioisotopes, holotoxins, modified toxins, catalytic subunits of toxins, or any molecules or enzymes not normally present in or on the surface of a cell that under defined conditions cause the cell's death. Toxins that may be used according to the methods of the invention include, but are not limited to, radioisotopes known in the art, compounds such as, for example, antibodies (or complement fixing containing portions thereof) that bind an inherent or induced endogenous cytotoxic effector system, thymidine kinase, endonuclease, RNAse, alpha toxin, ricin, abrin, Pseudomonas exotoxin A, diphtheria toxin, saporin, momordin, gelonin, pokeweed antiviral protein, alpha-sarcin and cholera toxin. “Toxin” also includes a cytostatic or cytocidal agent, a therapeutic agent or a radioactive metal ion, e.g., alpha-emitters such as, for example, ²¹³Bi, or other radioisotopes such as, for example, ¹⁰³Pd, ¹³³Xe, ¹³¹I, ⁶⁸Ge, ⁵⁷Co, ⁶⁵Zn, ⁸⁵Sr, ³²P, ³⁵S, ⁹⁰U, ¹⁵³Sm, ¹⁵³Gd, ¹⁶⁹Yb, ⁵¹Cr, ⁵⁴Mn, ⁷⁵Se, ¹¹³Sn, ⁹⁰Yttrium, ¹¹⁷Tin, ¹⁸⁶Rhenium, ¹⁶⁶Holmium, and ¹⁸⁸Rhenium; luminescent labels, such as luminol; and fluorescent labels, such as fluorescein and rhodamine, and biotin.

[0326] In a specific embodiment, the invention provides a method for the specific destruction of cells (e.g., the destruction of tumor cells) by administering polypeptides of the invention or antibodies of the invention in association with the radioisotope ⁹⁰Y. In another specific embodiment, the invention provides a method for the specific destruction of cells (e.g., the destruction of tumor cells) by administering polypeptides of the invention or antibodies of the invention in association with the radioisotope ¹¹¹In. In a further specific embodiment, the invention provides a method for the specific destruction of cells (e.g., the destruction of tumor cells) by administering polypeptides of the invention or antibodies of the invention in association with the radioisotope ¹³¹I.

[0327] Techniques known in the art may be applied to label polypeptides of the invention (including antibodies). Such techniques include, but are not limited to, the use of bifunctional conjugating agents (see e.g., U.S. Pat. Nos. 5,756,065; 5,714,631; 5,696,239; 5,652,361; 5,505,931; 5,489,425; 5,435,990; 5,428,139; 5,342,604; 5,274,119; 4,994,560; and 5,808,003; the contents of each of which are hereby incorporated by reference in its entirety).

[0328] Thus, the invention provides a diagnostic method of a disorder, which involves (a) assaying the expression level of a pancreatic cancer polypeptide of the present invention in cells or body fluid of an individual, or more preferably, assaying the expression level of a pancreatic cancer polypeptide of the present invention in pancreatic cells or bile of an individual; and (b) comparing the assayed polypeptide expression level with a standard polypeptide expression level, whereby an increase or decrease in the assayed polypeptide expression level compared to the standard expression level is indicative of a disorder. With respect to cancer, the presence of a relatively high amount of transcript in biopsied tissue from an individual may indicate a predisposition for the development of the disease, or may provide a means for detecting the disease prior to the appearance of actual clinical symptoms. A more definitive diagnosis of this type may allow health professionals to employ preventative measures or aggressive treatment earlier thereby preventing the development or further progression of the cancer.

[0329] Moreover, polypeptides of the present invention can be used to treat or prevent diseases or conditions of the pancreas such as, for example, diabetes mellitus, diabetes insipidus, congenital pancreatic agenesis, pancreatic cancers (e.g., benign or malignant forms of pancreatic cancer, as well as any particular type of cancer arising from cells of the pancreas (e.g., duct cell carcinoma, acinar cell carcinoma, papillary carcinoma, adenosquamous carcinoma, undifferentiated carcinoma, mucinous carcinoma, giant cell carcinoma, mixed type pancreatic cancer, small cell carcinoma, cystadenocarcinoma, unclassified pancreatic cancers, pancreatoblastoma, adenocarcinoma, islet-cell tumors, cystic neoplasms, and papillary-cyctic neoplasm and the like), as well as any stage of such cancers (e.g., stages I to IV in severity)), cystic fibrosis, cyst (e.g., pancreatic pseudocyst), pancreatic fistula, insufficiency, pancreatic dysplasia, pancreatitis (e.g., chronic pancreatitis, acute pancreatitis, acute necrotizing pancreatitis, alcoholic pancreatitis, and pancreatic abscesses associated with pancreatic inflammation), and/or those disorders as described under “Endocrine Disorders” and/or “Gastrointestinal Disorders” below. For example, patients can be administered a polypeptide of the present invention in an effort to replace absent or decreased levels of the polypeptide (e.g., insulin), to supplement absent or decreased levels of a different polypeptide (e.g., hemoglobin S for hemoglobin B, SOD, catalase, DNA repair proteins), to inhibit the activity of a polypeptide (e.g., an oncogene or tumor suppressor), to activate the activity of a polypeptide (e.g., by binding to a receptor), to reduce the activity of a membrane bound receptor by competing with it for free ligand (e.g., soluble TNF receptors used in reducing inflammation), or to bring about a desired response (e.g., blood vessel growth inhibition, enhancement of the immune response to proliferative cells or tissues).

[0330] Similarly, antibodies directed to a polypeptide of the present invention can also be used to treat disease (as described supra, and elsewhere herein). For example, administration of an antibody directed to a polypeptide of the present invention can bind, and/or neutralize the polypeptide, and/or reduce overproduction of the polypeptide. Similarly, administration of an antibody can activate the polypeptide, such as by binding to a polypeptide bound to a membrane (receptor).

[0331] At the very least, the polypeptides of the present invention can be used as molecular weight markers on SDS-PAGE gels or on molecular sieve gel filtration columns using methods well known to those of skill in the art. Polypeptides can also be used to raise antibodies, which in turn are used to measure protein expression from a recombinant cell, as a way of assessing transformation of the host cell. Moreover, the polypeptides of the present invention can be used to test the following biological activities.

[0332] Diagnostic Assays

[0333] The compounds of the present invention are useful for diagnosis, treatment, prevention and/or prognosis of various pancreatic related disorders in mammals, preferably humans. Such disorders include, but are not limited to, diabetes mellitus, diabetes insipidus, congenital pancreatic agenesis, pancreatic cancers (e.g., benign or malignant forms of pancreatic cancer, as well as any particular type of cancer arising from cells of the pancreas (e.g., duct cell carcinoma, acinar cell carcinoma, papillary carcinoma, adenosquamous carcinoma, undifferentiated carcinoma, mucinous carcinoma, giant cell carcinoma, mixed type pancreatic cancer, small cell carcinoma, cystadenocarcinoma, unclassified pancreatic cancers, pancreatoblastoma, adenocarcinoma, islet-cell tumors, cystic neoplasms, and papillary-cyctic neoplasm and the like), as well as any stage of such cancers (e.g., stages I to IV in severity)), cystic fibrosis, cyst (e.g., pancreatic pseudocyst), pancreatic fistula, insufficiency, pancreatic dysplasia, pancreatitis (e.g., chronic pancreatitis, acute pancreatitis, acute necrotizing pancreatitis, alcoholic pancreatitis, and pancreatic abscesses associated with pancreatic inflammation), and/or those disorders as described under “Endocrine Disorders” and/or “Gastrointestinal Disorders” below.

[0334] Pancreatic antigens are expressed in the pancreas, with an increased expression level in pancreatic tissues. For a number of pancreatic-related disorders, substantially altered (increased or decreased) levels of pancreatic antigen gene expression can be detected in pancreatic tissue or other cells or bodily fluids (e.g., sera, plasma, urine, semen, synovial fluid or spinal fluid) taken from an individual having such a disorder, relative to a “standard” pancreatic antigen gene expression level, that is, the pancreatic antigen expression level in pancreatic tissues or bodily fluids from an individual not having the pancreatic disorder. Thus, the invention provides a diagnostic method useful during diagnosis of a pancreatic disorder, which involves measuring the expression level of the gene encoding the pancreatic associated polypeptide in pancreatic tissue or other cells or body fluid from an individual and comparing the measured gene expression level with a standard pancreatic antigens gene expression level, whereby an increase or decrease in the gene expression level(s) compared to the standard is indicative of an pancreatic disorder.

[0335] In specific embodiments, the invention provides a diagnostic method useful during diagnosis of a disorder of a normal or diseased tissue/cell source, which involves measuring the expression level of the coding sequence of a polynucleotide sequence associated with this tissue/cell source as disclosed in Tables 1 and 5 in the tissue/cell source or other cells or body fluid from an individual and comparing the expression level of the coding sequence with a standard expression level of the coding sequence of a polynucleotide sequence, whereby an increase or decrease in the gene expression level(s) compared to the standard is indicative of a disorder of a normal or diseased tissue/cell source.

[0336] In particular, it is believed that certain tissues in mammals with cancer of cells or tissue of the pancreas express significantly enhanced or reduced levels of normal or altered pancreatic antigen expression and mRNA encoding the pancreatic associated polypeptide when compared to a corresponding “standard” level. Further, it is believed that enhanced or depressed levels of the pancreatic associated polypeptide can be detected in certain body fluids (e.g., sera, plasma, urine, and spinal fluid) or cells or tissue from mammals with such a cancer when compared to sera from mammals of the same species not having the cancer.

[0337] For example, as disclosed herein, pancreatic associated polypeptides of the invention are expressed in the pancreas. Accordingly, polynucleotides of the invention (e.g., polynucleotide sequences complementary to all or a portion of a pancreatic antigen mRNA nucleotide sequence of SEQ ID NO:X, the nucleotide coding sequence of the related cDNA contained in a deposited library, a nucleotide sequence encoding SEQ ID NO:Y, a nucleotide sequence encoding a polypeptide encoded by SEQ ID NO:X, the nucleotide sequence encoding the polypeptide encoded by the cDNA in the related cDNA contained in a deposited library, polynucleotide fragments of any of these nucleic acid molecules (e.g., those fragments described herein), and/or antibodies (and antibody fragments) directed against the polypeptides of the invention may be used to quantitate or qualitate concentrations of cells of the pancreas expressing pancreatic antigens, preferably on their cell surfaces. These polynucleotides and antibodies additionally have diagnostic applications in detecting abnormalities in the level of pancreatic antigens gene expression, or abnormalities in the structure and/or temporal, tissue, cellular, or subcellular location of pancreatic antigens. These diagnostic assays may be performed in vivo or in vitro, such as, for example, on blood samples, biopsy tissue or autopsy tissue.

[0338] Thus, the invention provides a diagnostic method useful during diagnosis of a pancreatic disorder, including cancers, which involves measuring the expression level of the gene encoding the pancreatic antigen polypeptide in pancreatic tissue or other cells or body fluid from an individual and comparing the measured gene expression level with a standard pancreatic antigen gene expression level, whereby an increase or decrease in the gene expression level compared to the standard is indicative of a pancreatic disorder.

[0339] Where a diagnosis of a disorder in the pancreas, including diagnosis of a tumor, has already been made according to conventional methods, the present invention is useful as a prognostic indicator, whereby patients exhibiting enhanced or depressed pancreatic antigen gene expression will experience a worse clinical outcome relative to patients expressing the gene at a level nearer the standard level.

[0340] By “assaying the expression level of the gene encoding the pancreatic associated polypeptide” is intended qualitatively or quantitatively measuring or estimating the level of the pancreatic antigen polypeptide or the level of the mRNA encoding the pancreatic antigen polypeptide in a first biological sample either directly (e.g., by determining or estimating absolute protein level or mRNA level) or relatively (e.g., by comparing to the pancreatic associated polypeptide level or mRNA level in a second biological sample). Preferably, the pancreatic antigen polypeptide expression level or mRNA level in the first biological sample is measured or estimated and compared to a standard pancreatic antigen polypeptide level or mRNA level, the standard being taken from a second biological sample obtained from an individual not having the disorder or being determined by averaging levels from a population of individuals not having a disorder of the pancreas. As will be appreciated in the art, once a standard pancreatic antigen polypeptide level or mRNA level is known, it can be used repeatedly as a standard for comparison.

[0341] By “biological sample” is intended any biological sample obtained from an individual, cell line, tissue culture, or other source containing pancreatic antigen polypeptides (including portions thereof) or mRNA. As indicated, biological samples include body fluids (such as sera, plasma, urine, synovial fluid and spinal fluid) which contain cells expressing pancreatic antigen polypeptides, pancreatic tissue, and other tissue sources found to express the full length or fragments thereof of a pancreatic antigen. Methods for obtaining tissue biopsies and body fluids from mammals are well known in the art. Where the biological sample is to include mRNA, a tissue biopsy is the preferred source.

[0342] Total cellular RNA can be isolated from a biological sample using any suitable technique such as the single-step guanidinium-thiocyanate-phenol-chloroform method described in Chomczynski and Sacchi, Anal. Biochem. 162:156-159 (1987). Levels of mRNA encoding the pancreatic antigen polypeptides are then assayed using any appropriate method. These include Northern blot analysis, S1 nuclease mapping, the polymerase chain reaction (PCR), reverse transcription in combination with the polymerase chain reaction (RT-PCR), and reverse transcription in combination with the ligase chain reaction (RT-LCR).

[0343] The present invention also relates to diagnostic assays such as quantitative and diagnostic assays for detecting levels of pancreatic antigen polypeptides, in a biological sample (e.g., cells and tissues), including determination of normal and abnormal levels of polypeptides. Thus, for instance, a diagnostic assay in accordance with the invention for detecting over-expression of pancreatic antigens compared to normal control tissue samples may be used to detect the presence of tumors. Assay techniques that can be used to determine levels of a polypeptide, such as a pancreatic antigen polypeptide of the present invention in a sample derived from a host are well-known to those of skill in the art. Such assay methods include radioimmunoassays, competitive-binding assays, Western Blot analysis and ELISA assays. Assaying pancreatic antigen polypeptide levels in a biological sample can occur using any art-known method.

[0344] Assaying pancreatic antigen polypeptide levels in a biological sample can occur using antibody-based techniques. For example, pancreatic antigen polypeptide expression in tissues can be studied with classical immunohistological methods (Jalkanen et al., J. Cell. Biol. 101:976-985 (1985); Jalkanen, M., et al., J. Cell. Biol. 105:3087-3096 (1987)). Other antibody-based methods useful for detecting pancreatic antigen polypeptide gene expression include immunoassays, such as the enzyme linked immunosorbent assay (ELISA) and the radioimmunoassay (RIA). Suitable antibody assay labels are known in the art and include enzyme labels, such as, glucose oxidase, and radioisotopes, such as iodine (¹²⁵I, ¹²¹I), carbon (¹⁴C), sulfur (³⁵S), tritium (³H), indium ¹¹²In), and technetium (^{99m}Tc), and fluorescent labels, such as fluorescein and rhodamine, and biotin.

[0345] The tissue or cell type to be analyzed will generally include those which are known, or suspected, to express the pancreatic antigen gene (such as, for example, cells of the pancreas or pancreatic cancer). The protein isolation methods employed herein may, for example, be such as those described in Harlow and Lane (Harlow, E. and Lane, D., 1988, “Antibodies: A Laboratory Manual”, Cold Spring Harbor Laboratory Press, Cold Spring Harbor, N.Y.), which is incorporated herein by reference in its entirety. The isolated cells can be derived from cell culture or from a patient. The analysis of cells taken from culture may be a necessary step in the assessment of cells that could be used as part of a cell-based gene therapy technique or, alternatively, to test the effect of compounds on the expression of the pancreatic antigen gene.

[0346] For example, antibodies, or fragments of antibodies, such as those described herein, may be used to quantitatively or qualitatively detect the presence of pancreatic antigen gene products or conserved variants or peptide fragments thereof. This can be accomplished, for example, by immunofluorescence techniques employing a fluorescently labeled antibody coupled with light microscopic, flow cytometric, or fluorimetric detection.

[0347] In a preferred embodiment, antibodies, or fragments of antibodies directed to any one or all of the predicted epitope domains of the pancreatic antigen polypeptides (Shown in Table 4) may be used to quantitatively or qualitatively detect the presence of pancreatic antigen gene products or conserved variants or peptide fragments thereof. This can be accomplished, for example, by immunofluorescence techniques employing a fluorescently labeled antibody coupled with light microscopic, flow cytometric, or fluorimetric detection.

[0348] In an additional preferred embodiment, antibodies, or fragments of antibodies directed to a conformational epitope of a pancreatic antigen may be used to quantitatively or qualitatively detect the presence of pancreatic antigen gene products or conserved variants or peptide fragments thereof. This can be accomplished, for example, by immunofluorescence techniques employing a fluorescently labeled antibody coupled with light microscopic, flow cytometric, or fluorimetric detection.

[0349] The antibodies (or fragments thereof), and/or pancreatic antigen polypeptides of the present invention may, additionally, be employed histologically, as in immunofluorescence, immunoelectron microscopy or non-immunological assays, for in situ detection of pancreatic antigen gene products or conserved variants or peptide fragments thereof. In situ detection may be accomplished by removing a histological specimen from a patient, and applying thereto a labeled antibody or pancreatic antigen polypeptide of the present invention. The antibody (or fragment thereof) or pancreatic antigen polypeptide is preferably applied by overlaying the labeled antibody (or fragment) onto a biological sample. Through the use of such a procedure, it is possible to determine not only the presence of the pancreatic antigen gene product, or conserved variants or peptide fragments, or pancreatic antigen polypeptide binding, but also its distribution in the examined tissue. Using the present invention, those of ordinary skill will readily perceive that any of a wide variety of histological methods (such as staining procedures) can be modified in order to achieve such in situ detection.

[0350] Immunoassays and non-immunoassays for pancreatic antigen gene products or conserved variants or peptide fragments thereof will typically comprise incubating a sample, such as a biological fluid, a tissue extract, freshly harvested cells, or lysates of cells which have been incubated in cell culture, in the presence of a detectably labeled antibody capable of binding pancreatic antigen gene products or conserved variants or peptide fragments thereof, and detecting the bound antibody by any of a number of techniques well-known in the art.

[0351] The biological sample may be brought in contact with and immobilized onto a solid phase support or carrier such as nitrocellulose, or other solid support which is capable of immobilizing cells, cell particles or soluble proteins. The support may then be washed with suitable buffers followed by treatment with the detectably labeled anti-pancreatic antigen antibody or detectable pancreatic antigen polypeptide. The solid phase support may then be washed with the buffer a second time to remove unbound antibody or polypeptide. Optionally the antibody is subsequently labeled. The amount of bound label on solid support may then be detected by conventional means.

[0352] By “solid phase support or carrier” is intended any support capable of binding an antigen or an antibody. Well-known supports or carriers include glass, polystyrene, polypropylene, polyethylene, dextran, nylon, amylases, natural and modified celluloses, polyacrylamides, gabbros, and magnetite. The nature of the carrier can be either soluble to some extent or insoluble for the purposes of the present invention. The support material may have virtually any possible structural configuration so long as the coupled molecule is capable of binding to an antigen or antibody. Thus, the support configuration may be spherical, as in a bead, or cylindrical, as in the inside surface of a test tube, or the external surface of a rod. Alternatively, the surface may be flat such as a sheet, test strip, etc. Preferred supports include polystyrene beads. Those skilled in the art will know many other suitable carriers for binding antibody or antigen, or will be able to ascertain the same by use of routine experimentation.

[0353] The binding activity of a given lot of anti-pancreatic antigen antibody or pancreatic antigen polypeptide may be determined according to well known methods. Those skilled in the art will be able to determine operative and optimal assay conditions for each determination by employing routine experimentation.

[0354] In addition to assaying pancreatic antigen polypeptide levels or polynucleotide levels in a biological sample obtained from an individual, pancreatic antigen polypeptide or polynucleotide can also be detected in vivo by imaging. For example, in one embodiment of the invention, pancreatic antigen polypeptide and/or anti-pancreatic antigen antibodies are used to image pancreatic diseased cells, such as neoplasms. In another embodiment, pancreatic antigen polynucleotides of the invention (e.g., polynucleotides complementary to all or a portion of pancreatic antigen mRNA) and/or anti-pancreatic antigen antibodies (e.g., antibodies directed to any one or a combination of the epitopes of pancreatic antigens, antibodies directed to a conformational epitope of pancreatic antigens, antibodies directed to the full length polypeptide expressed on the cell surface of a mammalian cell) are used to image diseased or neoplastic cells of the pancreas.

[0355] Antibody labels or markers for in vivo imaging of pancreatic antigen polypeptides include those detectable by X-radiography, NMR, MRI, CAT-scans or ESR. For X-radiography, suitable labels include radioisotopes such as barium or cesium, which emit detectable radiation but are not overtly harmful to the subject. Suitable markers for NMR and ESR include those with a detectable characteristic spin, such as deuterium, which may be incorporated into the antibody by labeling of nutrients for the relevant hybridoma. Where in vivo imaging is used to detect enhanced levels of pancreatic antigen polypeptides for diagnosis in humans, it may be preferable to use human antibodies or “humanized” chimeric monoclonal antibodies. Such antibodies can be produced using techniques described herein or otherwise known in the art. For example methods for producing chimeric antibodies are known in the art. See, for review, Morrison, Science 229:1202 (1985); Oi et al., BioTechniques 4:214 (1986); Cabilly et al., U.S. Pat. No. 4,816,567; Taniguchi et al., EP 171496; Morrison et al., EP 173494; Neuberger et al., WO 8601533; Robinson et al., WO 8702671; Boulianne et al., Nature 312:643 (1984); Neuberger et al., Nature 314:268 (1985).

[0356] Additionally, any pancreatic antigen polypeptides whose presence can be detected, can be administered. For example, pancreatic antigen polypeptides labeled with a radio-opaque or other appropriate compound can be administered and visualized in vivo, as discussed, above for labeled antibodies. Further such pancreatic antigen polypeptides can be utilized for in vitro diagnostic procedures.

[0357] A pancreatic antigen polypeptide-specific antibody or antibody fragment which has been labeled with an appropriate detectable imaging moiety, such as a radioisotope (for example, ¹³¹I, ¹¹²In, ^{99m}Tc), a radio-opaque substance, or a material detectable by nuclear magnetic resonance, is introduced (for example, parenterally, subcutaneously or intraperitoneally) into the mammal to be examined for a pancreatic disorder. It will be understood in the art that the size of the subject and the imaging system used will determine the quantity of imaging moiety needed to produce diagnostic images. In the case of a radioisotope moiety, for a human subject, the quantity of radioactivity injected will normally range from about 5 to 20 millicuries of ^{99m}Tc. The labeled antibody or antibody fragment will then preferentially accumulate at the location of cells which contain pancreatic antigen protein. In vivo tumor imaging is described in S. W. Burchiel et al., “Immunopharmacokinetics of Radiolabeled Antibodies and Their Fragments” (Chapter 13 in Tumor Imaging: The Radiochemical Detection of Cancer, S. W. Burchiel and B. A. Rhodes, eds., Masson Publishing Inc. (1982)).

[0358] With respect to antibodies, one of the ways in which the anti-pancreatic antigen antibody can be detectably labeled is by linking the same to an enzyme and using the linked product in an enzyme immunoassay (EIA) (Voller, A., “The Enzyme Linked Immunosorbent Assay (ELISA)”, 1978, Diagnostic Horizons 2:1-7, Microbiological Associates Quarterly Publication, Walkersville, Md.); Voller et al., J. Clin. Pathol. 31:507-520 (1978); Butler, J. E., Meth. Enzymol. 73:482-523 (1981); Maggio, E. (ed.), 1980, Enzyme Immunoassay, CRC Press, Boca Raton, Fla.,; Ishikawa, E. et al., (eds.), 1981, Enzyme Immunoassay, Kgaku Shoin, Tokyo). The enzyme, which is bound to the antibody will react with an appropriate substrate, preferably a chromogenic substrate, in such a manner as to produce a chemical moiety which can be detected, for example, by spectrophotometric, fluorimetric or by visual means. Enzymes which can be used to detectably label the antibody include, but are not limited to, malate dehydrogenase, staphylococcal nuclease, delta-5-steroid isomerase, yeast alcohol dehydrogenase, alpha-glycerophosphate, dehydrogenase, triose phosphate isomerase, horseradish peroxidase, alkaline phosphatase, asparaginase, glucose oxidase, beta-galactosidase, ribonuclease, urease, catalase, glucose-6-phosphate dehydrogenase, glucoamylase and acetylcholinesterase. Additionally, the detection can be accomplished by colorimetric methods which employ a chromogenic substrate for the enzyme. Detection may also be accomplished by visual comparison of the extent of enzymatic reaction of a substrate in comparison with similarly prepared standards.

[0359] Detection may also be accomplished using any of a variety of other immunoassays. For example, by radioactively labeling the antibodies or antibody fragments, it is possible to detect pancreatic antigens through the use of a radioimmunoassay (RIA) (see, for example, Weintraub, B., Principles of Radioimmunoassays, Seventh Training Course on Radioligand Assay Techniques, The Endocrine Society, March, 1986, which is incorporated by reference herein). The radioactive isotope can be detected by means including, but not limited to, a gamma counter, a scintillation counter, or autoradiography.

[0360] It is also possible to label the antibody with a fluorescent compound. When the fluorescently labeled antibody is exposed to light of the proper wave length, its presence can then be detected due to fluorescence. Among the most commonly used fluorescent labeling compounds are fluorescein isothiocyanate, rhodamine, phycoerythrin, phycocyanin, allophycocyanin, ophthaldehyde and fluorescamine.

[0361] The antibody can also be detectably labeled using fluorescence emitting metals such as ¹⁵²Eu, or others of the lanthanide series. These metals can be attached to the antibody using such metal chelating groups as diethylenetriaminepentacetic acid (DTPA) or ethylenediaminetetraacetic acid (EDTA).

[0362] The antibody also can be detectably labeled by coupling it to a chemiluminescent compound. The presence of the chemiluminescent-tagged antibody is then determined by detecting the presence of luminescence that arises during the course of a chemical reaction. Examples of particularly useful chemiluminescent labeling compounds are luminol, isoluminol, theromatic acridinium ester, imidazole, acridinium salt and oxalate ester.

[0363] Likewise, a bioluminescent compound may be used to label the antibody of the present invention. Bioluminescence is a type of chemiluminescence found in biological systems in, which a catalytic protein increases the efficiency of the chemiluminescent reaction. The presence of a bioluminescent protein is determined by detecting the presence of luminescence. Important bioluminescent compounds for purposes of labeling are luciferin, luciferase and aequorin.

[0364] Methods for Detecting Pancreatic Disease, Including Cancer

[0365] In general, a pancreatic disease or cancer may be detected in a patient based on the presence of one or more pancreatic antigen proteins of the invention and/or polynucleotides encoding such proteins in a biological sample (for example, blood, sera, urine, and/or tumor biopsies) obtained from the patient. In other words, such proteins and/or polynucleotides may be used as markers to indicate the presence or absence of a pancreatic disease or disorder, including cancer. Cancers that may be diagnosed, and/or prognosed using the compositions of the invention include but are not limited to, pancreatic cancer. The binding agents provided herein generally permit detection of the level of antigen that binds to the agent in the biological sample. Polynucleotide primers and probes may be used to detect the level of mRNA encoding pancreatic antigen polypeptides, which is also indicative of the presence or absence of a pancreatic disease or disorder, including cancer. In general, pancreatic antigen polypeptides should be present at a level that is at least three fold higher in diseased tissue than in normal tissue.

[0366] There are a variety of assay formats known to those of ordinary skill in the art for using a binding agent to detect polypeptide markers in a sample. See, e.g., Harlow and Lane, supra. In general, the presence or absence of a pancreatic disease in a patient may be determined by (a) contacting a biological sample obtained from a patient with a binding agent; (b) detecting in the sample a level of polypeptide that binds to the binding agent; and (c) comparing the level of polypeptide with a predetermined cut-off value.

[0367] In a preferred embodiment, the assay involves the use of binding agent immobilized on a solid support to bind to and remove the pancreatic antigen polypeptide of the invention from the remainder of the sample. The bound polypeptide may then be detected using a detection reagent that contains a reporter group and specifically binds to the binding agent/polypeptide complex. Such detection reagents may comprise, for example, a binding agent that specifically binds to the polypeptide or an antibody or other agent that specifically binds to the binding agent, such as an anti-immunoglobulin, protein G, protein A or a lectin. Alternatively, a competitive assay may be utilized, in which a polypeptide is labeled with a reporter group and allowed to bind to the immobilized binding agent after incubation of the binding agent with the sample. The extent to which components of the sample inhibit the binding of the labeled polypeptide to the binding agent is indicative of the reactivity of the sample with the immobilized binding agent. Suitable polypeptides for use within such assays include pancreatic antigen polypeptides and portions thereof, or antibodies, to which the binding agent binds, as described above.

[0368] The solid support may be any material known to those of skill in the art to which pancreatic antigen polypeptides of the invention may be attached. For example, the solid support may be a test well in a microtiter plate or a nitrocellulose or other suitable membrane. Alternatively, the support may be a bead or disc, such as glass fiberglass, latex or a plastic material such as polystyrene or polyvinylchloride. The support may also be a magnetic particle or a fiber optic sensor, such as those disclosed, for example, in U.S. Pat. No. 5,359,681. The binding agent may be immobilized on the solid support using a variety of techniques known to those of skill in the art, which are amply described in the patent and scientific literature. In the context of the present invention, the term “immobilization” refers to both noncovalent association, such as adsorption, and covalent attachment (which may be a direct linkage between the agent and functional groups on the support or may be a linkage by way of a cross-linking agent). Immobilization by adsorption to a well in a microtiter plate or to a membrane is preferred. In such cases, adsorption may be achieved by contacting the binding agent, in a suitable buffer, with the solid support for the suitable amount of time. The contact time varies with temperature, but is typically between about 1 hour and about 1 day. In general, contacting a well of plastic microtiter plate (such as polystyrene or polyvinylchloride) with an amount of binding agent ranging from about 10 ng to about 10 ug, and preferably about 100 ng to about 1 ug, is sufficient to immobilize an adequate amount of binding agent.

[0369] Covalent attachment of binding agent to a solid support may generally be achieved by first reacting the support with a bifunctional reagent that will react with both the support and a functional group, such as a hydroxyl or amino group, on the binding agent. For example, the binding agent may be covalently attached to supports having an appropriate polymer coating using benzoquinone or by condensation of an aldehyde group on the support with an amine and an active hydrogen on the binding partner (see, e.g., Pierce Immunotechnology Catalog and Handbook, 1991, at A12-A13).

[0370] Gene Therapy Methods

[0371] Another aspect of the present invention is to gene therapy methods for treating or preventing disorders, diseases and conditions. The gene therapy methods relate to the introduction of nucleic acid (DNA, RNA and antisense DNA or RNA) sequences into an animal to achieve expression of the polypeptide of the present invention. This method requires a polynucleotide which codes for a polypeptide of the present invention operatively linked to a promoter and any other genetic elements necessary for the expression of the polypeptide by the target tissue. Such gene therapy and delivery techniques are known in the art, see, for example, WO90/11092, which is herein incorporated by reference.

[0372] Thus, for example, cells from a patient may be engineered with a polynucleotide (DNA or RNA) comprising a promoter operably linked to a polynucleotide of the present invention ex vivo, with the engineered cells then being provided to a patient to be treated with the polypeptide of the present invention. Such methods are well-known in the art. For example, see Belldegrun, A., et al., J. Natl. Cancer Inst. 85: 207-216 (1993); Ferrantini, M. et al., Cancer Research 53: 1107-1112 (1993); Ferrantini, M. et al., J. Immunology 153: 4604-4615 (1994); Kaido, T., et al., Int. J. Cancer 60: 221-229 (1995); Ogura, H., et al., Cancer Research 50: 5102-5106 (1990); Santodonato, L., et al., Human Gene Therapy 7:1-10 (1996); Santodonato, L., et al., Gene Therapy 4:1246-1255 (1997); and Zhang, J.-F. et al., Cancer Gene Therapy 3: 31-38 (1996)), which are herein incorporated by reference. In one embodiment, the cells which are engineered are arterial cells. The arterial cells may be reintroduced into the patient through direct injection to the artery, the tissues surrounding the artery, or through catheter injection.

[0373] As discussed in more detail below, the polynucleotide constructs can be delivered by any method that delivers injectable materials to the cells of an animal, such as, injection into the interstitial space of tissues (heart, muscle, skin, lung, liver, and the like). The polynucleotide constructs may be delivered in a pharmaceutically acceptable liquid or aqueous carrier.

[0374] In one embodiment, the polynucleotide of the present invention is delivered as a naked polynucleotide. The term “naked” polynucleotide, DNA or RNA refers to sequences that are free from any delivery vehicle that acts to assist, promote or facilitate entry into the cell, including viral sequences, viral particles, liposome formulations, lipofectin or precipitating agents and the like. However, the polynucleotide of the present invention can also be delivered in liposome formulations and lipofectin formulations and the like can be prepared by methods well known to those skilled in the art. Such methods are described, for example, in U.S. Pat. Nos. 5,593,972, 5,589,466, and 5,580,859, which are herein incorporated by reference.

[0375] The polynucleotide vector constructs used in the gene therapy method are preferably constructs that will not integrate into the host genome nor will they contain sequences that allow for replication. Appropriate vectors include pWLNEO, pSV2CAT, pOG44, pXT1 and pSG available from Stratagene; pSVK3, pBPV, pMSG and pSVL available from Pharmacia; and pEF1/V5, pcDNA3.1, and pRc/CMV2 available from Invitrogen. Other suitable vectors will be readily apparent to the skilled artisan.

[0376] Any strong promoter known to those skilled in the art can be used for driving the expression of the polynucleotide sequence. Suitable promoters include adenoviral promoters, such as the adenoviral major late promoter; or heterologous promoters, such as the cytomegalovirus (CMV) promoter; the respiratory syncytial virus (RSV) promoter; inducible promoters, such as the MMT promoter, the metallothionein promoter; heat shock promoters; the albumin promoter; the ApoAI promoter; human globin promoters; viral thymidine kinase promoters, such as the Herpes Simplex thymidine kinase promoter; retroviral LTRs; the b-actin promoter; and human growth hormone promoters. The promoter also may be the native promoter for the polynucleotide of the present invention.

[0377] Unlike other gene therapy techniques, one major advantage of introducing naked nucleic acid sequences into target cells is the transitory nature of the polynucleotide synthesis in the cells. Studies have shown that non-replicating DNA sequences can be introduced into cells to provide production of the desired polypeptide for periods of up to six months.

[0378] The polynucleotide construct can be delivered to the interstitial space of tissues within the an animal, including of muscle, skin, brain, lung, liver, spleen, bone marrow, thymus, heart, lymph, blood, bone, cartilage, pancreas, kidney, gall bladder, stomach, intestine, testis, ovary, uterus, rectum, nervous system, eye, gland, and connective tissue. Interstitial space of the tissues comprises the intercellular, fluid, mucopolysaccharide matrix among the reticular fibers of organ tissues, elastic fibers in the walls of vessels or chambers, collagen fibers of fibrous tissues, or that same matrix within connective tissue ensheathing muscle cells or in the lacunae of bone. It is similarly the space occupied by the plasma of the circulation and the lymph fluid of the lymphatic channels. Delivery to the interstitial space of muscle tissue is preferred for the reasons discussed below. They may be conveniently delivered by injection into the tissues comprising these cells. They are preferably delivered to and expressed in persistent, non-dividing cells which are differentiated, although delivery and expression may be achieved in non-differentiated or less completely differentiated cells, such as, for example, stem cells of blood or skin fibroblasts. In vivo muscle cells are particularly competent in their ability to take up and express polynucleotides.

[0379] For the naked nucleic acid sequence injection, an effective dosage amount of DNA or RNA will be in the range of from about 0.05 mg/kg body weight to about 50 mg/kg body weight. Preferably the dosage will be from about 0.005 mg/kg to about 20 mg/kg and more preferably from about 0.05 mg/kg to about 5 mg/kg. Of course, as the artisan of ordinary skill will appreciate, this dosage will vary according to the tissue site of injection. The appropriate and effective dosage of nucleic acid sequence can readily be determined by those of ordinary skill in the art and may depend on the condition being treated and the route of administration.

[0380] The preferred route of administration is by the parenteral route of injection into the interstitial space of tissues. However, other parenteral routes may also be used, such as, inhalation of an aerosol formulation particularly for delivery to lungs or bronchial tissues, throat or mucous membranes of the nose. In addition, naked DNA constructs can be delivered to arteries during angioplasty by the catheter used in the procedure.

[0381] The naked polynucleotides are delivered by any method known in the art, including, but not limited to, direct needle injection at the delivery site, intravenous injection, topical administration, catheter infusion, and so-called “gene guns”. These delivery methods are known in the art.

[0382] The constructs may also be delivered with delivery vehicles such as viral sequences, viral particles, liposome formulations, lipofectin, precipitating agents, etc. Such methods of delivery are known in the art.

[0383] In certain embodiments, the polynucleotide constructs are complexed in a liposome preparation. Liposomal preparations for use in the instant invention include cationic (positively charged), anionic (negatively charged) and neutral preparations. However, cationic liposomes are particularly preferred because a tight charge complex can be formed between the cationic liposome and the polyanionic nucleic acid. Cationic liposomes have been shown to mediate intracellular delivery of plasmid DNA (Feigner et al., Proc. Natl. Acad. Sci. USA (1987) 84:7413-7416, which is herein incorporated by reference); mRNA (Malone et al., Proc. Natl. Acad. Sci. USA (1989) 86:6077-6081, which is herein incorporated by reference); and purified transcription factors (Debs et al., J. Biol. Chem. (1990) 265:10189-10192, which is herein incorporated by reference), in functional form.

[0384] Cationic liposomes are readily available. For example, N[1-2,3-dioleyloxy)propyl]-N,N,N-triethylammonium (DOTMA) liposomes are particularly useful and are available under the trademark Lipofectin, from GIBCO BRL, Grand Island, N.Y. (See, also, Felgner et al., Proc. Natl. Acad. Sci. USA (1987) 84:7413-7416, which is herein incorporated by reference). Other commercially available liposomes include transfectace (DDAB/DOPE) and DOTAP/DOPE (Boehringer).

[0385] Other cationic liposomes can be prepared from readily available materials using techniques well known in the art. See, e.g. PCT Publication No. WO 90/11092 (which is herein incorporated by reference) for a description of the synthesis of DOTAP (1,2-bis(oleoyloxy)-3-(trimethylammonio)propane) liposomes. Preparation of DOTMA liposomes is explained in the literature, see, e.g., P. Felgner et al., Proc. Natl. Acad. Sci. USA 84:7413-7417, which is herein incorporated by reference. Similar methods can be used to prepare liposomes from other cationic lipid materials.

[0386] Similarly, anionic and neutral liposomes are readily available, such as from Avanti Polar Lipids (Birmingham, Ala.), or can be easily prepared using readily available materials. Such materials include phosphatidyl, choline, cholesterol, phosphatidyl ethanolamine, dioleoylphosphatidyl choline (DOPC), dioleoylphosphatidyl glycerol (DOPG), dioleoylphoshatidyl ethanolamine (DOPE), among others. These materials can also be mixed with the DOTMA and DOTAP starting materials in appropriate ratios. Methods for making liposomes using these materials are well known in the art.

[0387] For example, commercially dioleoylphosphatidyl choline (DOPC), dioleoylphosphatidyl glycerol (DOPG), and dioleoylphosphatidyl ethanolamine (DOPE) can be used in various combinations to make conventional liposomes, with or without the addition of cholesterol. Thus, for example, DOPG/DOPC vesicles can be prepared by drying 50 mg each of DOPG and DOPC under a stream of nitrogen gas into a sonication vial. The sample is placed under a vacuum pump overnight and is hydrated the following day with deionized water. The sample is then sonicated for 2 hours in a capped vial, using a Heat Systems model 350 sonicator equipped with an inverted cup (bath type) probe at the maximum setting while the bath is circulated at 15EC. Alternatively, negatively charged vesicles can be prepared without sonication to produce multilamellar vesicles or by extrusion through nucleopore membranes to produce unilamellar vesicles of discrete size. Other methods are known and available to those of skill in the art.

[0388] The liposomes can comprise multilamellar vesicles (MLVs), small unilamellar vesicles (SUVs), or large unilamellar vesicles (LUVs), with SUVs being preferred. The various liposome-nucleic acid complexes are prepared using methods well known in the art. See, e.g., Straubinger et al., Methods of Immunology (1983), 101:512-527, which is herein incorporated by reference. For example, MLVs containing nucleic acid can be prepared by depositing a thin film of phospholipid on the walls of a glass tube and subsequently hydrating with a solution of the material to be encapsulated. SUVs are prepared by extended sonication of MLVs to produce a homogeneous population of unilamellar liposomes. The material to be entrapped is added to a suspension of preformed MLVs and then sonicated. When using liposomes containing cationic lipids, the dried lipid film is resuspended in an appropriate solution such as sterile water or an isotonic buffer solution such as 10 mM Tris/NaCl, sonicated, and then the preformed liposomes are mixed directly with the DNA. The liposome and DNA form a very stable complex due to binding of the positively charged liposomes to the cationic DNA. SUVs find use with small nucleic acid fragments. LUVs are prepared by a number of methods, well known in the art. Commonly used methods include Ca²⁺-EDTA chelation (Papahadjopoulos et al., Biochim. Biophys. Acta (1975) 394:483; Wilson et al., Cell (1979) 17:77); ether injection (Deamer, D. and Bangham, A., Biochim. Biophys. Acta (1976) 443:629; Ostro et al., Biochem. Biophys. Res. Commun. (1977) 76:836; Fraley et al., Proc. Natl. Acad. Sci. USA (1979) 76:3348); detergent dialysis (Enoch, H. and Strittmatter, P., Proc. Natl. Acad. Sci. USA (1979) 76:145); and reverse-phase evaporation (REV) (Fraley et al., J. Biol. Chem. (1980) 255:10431; Szoka, F. and Papahadjopoulos, D., Proc. Natl. Acad. Sci. USA (1978) 75:145; Schaefer-Ridder et al., Science (1982) 215:166), which are herein incorporated by reference.

[0389] Generally, the ratio of DNA to liposomes will be from about 10:1 to about 1:10. Preferably, the ration will be from about 5:1 to about 1:5. More preferably, the ration will be about 3:1 to about 1:3. Still more preferably, the ratio will be about 1:1.

[0390] U.S. Pat. No. 5,676,954 (which is herein incorporated by reference) reports on the injection of genetic material, complexed with cationic liposomes carriers, into mice. U.S. Pat. Nos. 4,897,355, 4,946,787, 5,049,386, 5,459,127, 5,589,466, 5,693,622, 5,580,859, 5,703,055, and international publication no. WO 94/9469 (which are herein incorporated by reference) provide cationic lipids for use in transfecting DNA into cells and mammals. U.S. Pat. Nos. 5,589,466, 5,693,622, 5,580,859, 5,703,055, and international publication no. WO 94/9469 (which are herein incorporated by reference) provide methods for delivering DNA-cationic lipid complexes to mammals.

[0391] In certain embodiments, cells are engineered, ex vivo or in vivo, using a retroviral particle containing RNA which comprises a sequence encoding a polypeptide of the present invention. Retroviruses from which the retroviral plasmid vectors may be derived include, but are not limited to, Moloney Murine Leukemia Virus, spleen necrosis virus, Rous sarcoma Virus, Harvey Sarcoma Virus, avian leukosis virus, gibbon ape leukemia virus, human immunodeficiency virus, Myeloproliferative Sarcoma Virus, and mammary tumor virus.

[0392] The retroviral plasmid vector is employed to transduce packaging cell lines to form producer cell lines. Examples of packaging cells which may be transfected include, but are not limited to, the PE501, PA317, R-2, R-AM, PA12, T19-14X, VT-19-17-H2, RCRE, RCRIP, GP+E-86, GP+envAm12, and DAN cell lines as described in Miller, Human Gene Therapy 1:5-14 (1990), which is incorporated herein by reference in its entirety. The vector may transduce the packaging cells through any means known in the art. Such means include, but are not limited to, electroporation, the use of liposomes, and CaPO₄ precipitation. In one alternative, the retroviral plasmid vector may be encapsulated into a liposome, or coupled to a lipid, and then administered to a host.

[0393] The producer cell line generates infectious retroviral vector particles which include polynucleotide encoding a polypeptide of the present invention. Such retroviral vector particles then may be employed, to transduce eukaryotic cells, either in vitro or in vivo. The transduced eukaryotic cells will express a polypeptide of the present invention.

[0394] In certain other embodiments, cells are engineered, ex vivo or in vivo, with polynucleotide contained in an adenovirus vector. Adenovirus can be manipulated such that it encodes and expresses a polypeptide of the present invention, and at the same time is inactivated in terms of its ability to replicate in a normal lytic viral life cycle. Adenovirus expression is achieved without integration of the viral DNA into the host cell chromosome, thereby alleviating concerns about insertional mutagenesis. Furthermore, adenoviruses have been used as live enteric vaccines for many years with an excellent safety profile (Schwartz, A. R. et al. (1974) Am. Rev. Respir. Dis. 109:233-238). Finally, adenovirus mediated gene transfer has been demonstrated in a number of instances including transfer of alpha-1-antitrypsin and CFTR to the lungs of cotton rats (Rosenfeld, M. A. et al. (1991) Science 252:431-434; Rosenfeld et al., (1992) Cell 68:143-155). Furthermore, extensive studies to attempt to establish adenovirus as a causative agent in human cancer were uniformly negative (Green, M. et al. (1979) Proc. Natl. Acad. Sci. USA 76:6606).

[0395] Suitable adenoviral vectors useful in the present invention are described, for example, in Kozarsky and Wilson, Curr. Opin. Genet. Devel. 3:499-503 (1993); Rosenfeld et al., Cell 68:143-155 (1992); Engelhardt et al., Human Genet. Ther. 4:759-769 (1993); Yang et al., Nature Genet. 7:362-369 (1994); Wilson et al., Nature 365:691-692 (1993); and U.S. Pat. No. 5,652,224, which are herein incorporated by reference. For example, the adenovirus vector Ad2 is useful and can be grown in human 293 cells. These cells contain the El region of adenovirus and constitutively express E1a and E1b, which complement the defective adenoviruses by providing the products of the genes deleted from the vector. In addition to Ad2, other varieties of adenovirus (e.g., Ad3, Ad5, and Ad7) are also useful in the present invention.

[0396] Preferably, the adenoviruses used in the present invention are replication deficient. Replication deficient adenoviruses require the aid of a helper virus and/or packaging cell line to form infectious particles. The resulting virus is capable of infecting cells and can express a polynucleotide of interest which is operably linked to a promoter, but cannot replicate in most cells. Replication deficient adenoviruses may be deleted in one or more of all or a portion of the following genes: E1a, E1b, E3, E4, E2a, or L1 through L5.

[0397] In certain other embodiments, the cells are engineered, ex vivo or in vivo, using an adeno-associated virus (AAV). AAVs are naturally occurring defective viruses that require helper viruses to produce infectious particles (Muzyczka, N., Curr. Topics in Microbiol. Immunol. 158:97 (1992)). It is also one of the few viruses that may integrate its DNA into non-dividing cells. Vectors containing as little as 300 base pairs of AAV can be packaged and can integrate, but space for exogenous DNA is limited to about 4.5 kb. Methods for producing and using such AAVs are known in the art. See, for example, U.S. Pat. Nos. 5,139,941, 5,173,414, 5,354,678, 5,436,146, 5,474,935, 5,478,745, and 5,589,377.

[0398] For example, an appropriate AAV vector for use in the present invention will include all the sequences necessary for DNA replication, encapsidation, and host-cell integration. The polynucleotide construct is inserted into the AAV vector using standard cloning methods, such as those found in Sambrook et al., Molecular Cloning: A Laboratory Manual, Cold Spring Harbor Press (1989). The recombinant AAV vector is then transfected into packaging cells which are infected with a helper virus, using any standard technique, including lipofection, electroporation, calcium phosphate precipitation, etc. Appropriate helper viruses include adenoviruses, cytomegaloviruses, vaccinia viruses, or herpes viruses. Once the packaging cells are transfected and infected, they will produce infectious AAV viral particles which contain the polynucleotide construct. These viral particles are then used to transduce eukaryotic cells, either ex vivo or in vivo. The transduced cells will contain the polynucleotide construct integrated into its genome, and will express a polypeptide of the invention.

[0399] Another method of gene therapy involves operably associating heterologous control regions and endogenous polynucleotide sequences (e.g. encoding a polypeptide of the present invention) via homologous recombination (see, e.g., U.S. Pat. No. 5,641,670, issued Jun. 24, 1997; International Publication No. WO 96/29411, published Sep. 26, 1996; International Publication No. WO 94/12650, published Aug. 4, 1994; Koller et al., Proc. Natl. Acad. Sci. USA 86:8932-8935 (1989); and Zijlstra et al., Nature 342:435-438 (1989). This method involves the activation of a gene which is present in the target cells, but which is not normally expressed in the cells, or is expressed at a lower level than desired.

[0400] Polynucleotide constructs are made, using standard techniques known in the art, which contain the promoter with targeting sequences flanking the promoter. Suitable promoters are described herein. The targeting sequence is sufficiently complementary to an endogenous sequence to permit homologous recombination of the promoter-targeting sequence with the endogenous sequence. The targeting sequence will be sufficiently near the 5′ end of the desired endogenous polynucleotide sequence so the promoter will be operably linked to the endogenous sequence upon homologous recombination.

[0401] The promoter and the targeting sequences can be amplified using PCR. Preferably, the amplified promoter contains distinct restriction enzyme sites on the 5′ and 3′ ends. Preferably, the 3′ end of the first targeting sequence contains the same restriction enzyme site as the 5′ end of the amplified promoter and the 5′ end of the second targeting sequence contains the same restriction site as the 3′ end of the amplified promoter. The amplified promoter and targeting sequences are digested and ligated together.

[0402] The promoter-targeting sequence construct is delivered to the cells, either as naked polynucleotide, or in conjunction with transfection-facilitating agents, such as liposomes, viral sequences, viral particles, whole viruses, lipofection, precipitating agents, etc., described in more detail above. The P promoter-targeting sequence can be delivered by any method, included direct needle injection, intravenous injection, topical administration, catheter infusion, particle accelerators, etc. The methods are described in more detail below.

[0403] The promoter-targeting sequence construct is taken up by cells. Homologous recombination between the construct and the endogenous sequence takes place, such that an endogenous sequence is placed under the control of the promoter. The promoter then drives the expression of the endogenous sequence.

[0404] Preferably, the polynucleotide encoding a polypeptide of the present invention contains a secretory signal sequence that facilitates secretion of the protein. Typically, the signal sequence is positioned in the coding region of the polynucleotide to be expressed towards or at the 5′ end of the coding region. The signal sequence may be homologous or heterologous to the polynucleotide of interest and may be homologous or heterologous to the cells to be transfected. Additionally, the signal sequence may be chemically synthesized using methods known in the art.

[0405] Any mode of administration of any of the above-described polynucleotides constructs can be used so long as the mode results in the expression of one or more molecules in an amount sufficient to provide a therapeutic effect. This includes direct needle injection, systemic injection, catheter infusion, biolistic injectors, particle accelerators (i.e., “gene guns”), gelfoam sponge depots, other commercially available depot materials, osmotic pumps (e.g., Alza minipumps), oral or suppositorial solid (tablet or pill) pharmaceutical formulations, and decanting or topical applications during surgery. For example, direct injection of naked calcium phosphate-precipitated plasmid into rat liver and rat spleen or a protein-coated plasmid into the portal vein has resulted in gene expression of the foreign gene in the rat livers (Kaneda et al., Science 243:375 (1989)).

[0406] A preferred method of local administration is by direct injection. Preferably, a recombinant molecule of the present invention complexed with a delivery vehicle is administered by direct injection into or locally within the area of arteries. Administration of a composition locally within the area of arteries refers to injecting the composition centimeters and preferably, millimeters within arteries.

[0407] Another method of local administration is to contact a polynucleotide construct of the present invention in or around a surgical wound. For example, a patient can undergo surgery and the polynucleotide construct can be coated on the surface of tissue inside the wound or the construct can be injected into areas of tissue inside the wound.

[0408] Therapeutic compositions useful in systemic administration, include recombinant molecules of the present invention complexed to a targeted delivery vehicle of the present invention. Suitable delivery vehicles for use with systemic administration comprise liposomes comprising ligands for targeting the vehicle to a particular site.

[0409] Preferred methods of systemic administration, include intravenous injection, aerosol, oral and percutaneous (topical) delivery. Intravenous injections can be performed using methods standard in the art. Aerosol delivery can also be performed using methods standard in the art (see, for example, Stribling et al., Proc. Natl. Acad. Sci. USA 189:11277-11281, 1992, which is incorporated herein by reference). Oral delivery can be performed by complexing a polynucleotide construct of the present invention to a carrier capable of withstanding degradation by digestive enzymes in the gut of an animal. Examples of such carriers, include plastic capsules or tablets, such as those known in the art. Topical delivery can be performed by mixing a polynucleotide construct of the present invention with a lipophilic reagent (e.g., DMSO) that is capable of passing into the skin.

[0410] Determining an effective amount of substance to be delivered can depend upon a number of factors including, for example, the chemical structure and biological activity of the substance, the age and weight of the animal, the precise condition requiring treatment and its severity, and the route of administration. The frequency of treatments depends upon a number of factors, such as the amount of polynucleotide constructs administered per dose, as well as the health and history of the subject. The precise amount, number of doses, and timing of doses will be determined by the attending physician or veterinarian.

[0411] Therapeutic compositions of the present invention can be administered to any animal, preferably to mammals and birds. Preferred mammals include humans, dogs, cats, mice, rats, rabbits sheep, cattle, horses and pigs, with humans being particularly preferred.

[0412] Biological Activities

[0413] Polynucleotides or polypeptides, or agonists or antagonists of the present invention, can be used in assays to test for one or more biological activities. If these polynucleotides or polypeptides, or agonists or antagonists of the present invention, do exhibit activity in a particular assay, it is likely that these molecules may be involved in the diseases associated with the biological activity. Thus, the polynucleotides and polypeptides, and agonists or antagonists could be used to treat, prevent diagnose and/or prognose the associated disease.

[0414] The pancreatic antigen polynucleotides and polypeptides of the invention are predicted to have predominant expression in pancreatic tissues.

[0415] Thus, the pancreatic antigens of the invention (e.g., polynucleotides of the invention (e.g., nucleotide coding sequence in SEQ ID NO:X, the nucleotide coding sequence of the related cDNA contained in a deposited library or fragments or variants thereof), polypeptides of the invention (e.g., the polypeptide of SEQ ID NO:Y, a polypeptide encoded by SEQ ID NO:X, a polypeptide encoded by the cDNA in the related cDNA clone contained in a deposited library, and/or fragments or variants thereof), and/or an antibody, or fragment thereof, directed to a polypeptide of the invention) may be useful as therapeutic molecules. Each would be useful for diagnosis, detection, treatment and/or prevention of diseases or disorders of the pancreas, including but not limited to diabetes mellitus, diabetes insipidus, congenital pancreatic agenesis, pancreatic cancers (e.g., benign or malignant forms of pancreatic cancer, as well as any particular type of cancer arising from cells of the pancreas (e.g., duct cell carcinoma, acinar cell carcinoma, papillary carcinoma, adenosquamous carcinoma, undifferentiated carcinoma, mucinous carcinoma, giant cell carcinoma, mixed type pancreatic cancer, small cell carcinoma, cystadenocarcinoma, unclassified pancreatic cancers, pancreatoblastoma, adenocarcinoma, islet-cell tumors, cystic neoplasms, and papillary-cyctic neoplasm and the like), as well as any stage of such cancers (e.g., stages I to IV in severity)), cystic fibrosis, cyst (e.g., pancreatic pseudocyst), pancreatic fistula, insufficiency, pancreatic dysplasia, pancreatitis (e.g., chronic pancreatitis, acute pancreatitis, acute necrotizing pancreatitis, alcoholic pancreatitis, and pancreatic abscesses associated with pancreatic inflammation), and/or those disorders as described under “Endocrine Disorders” and/or “Gastrointestinal Disorders” below.

[0416] Particularly, the pancreatic antigens may be a useful therapeutic for pancreatic cancer. Treatment, diagnosis, detection, and/or prevention of pancreatic disorders could be carried out using a pancreatic antigen or soluble form of a pancreatic antigen, a pancreatic antigen ligand, gene therapy, or ex vivo applications. Moreover, inhibitors of a pancreatic antigen, either blocking antibodies or mutant forms, could modulate the expression of the pancreatic antigen. These inhibitors may be useful to treat, diagnose, detect, and/or prevent diseases associated with the misregulation of a pancreatic antigen.

[0417] In one embodiment, the invention provides a method for the specific delivery of compositions of the invention to cells (e.g., normal or diseased pancreatic cells) by administering polypeptides of the invention (e.g., pancreatic antigen polypeptides or anti-pancreatic antigen antibodies) that are associated with heterologous polypeptides or nucleic acids. In one example, the invention provides a method for delivering a therapeutic protein into the targeted cell (e.g., an aberrant pancreatic cell or pancreatic cancer cell). In another example, the invention provides a method for delivering a single stranded nucleic acid (e.g., antisense or ribozymes) or double stranded nucleic acid (e.g., DNA that can integrate into the cell's genome or replicate episomally and that can be transcribed) into the targeted cell.

[0418] In another embodiment, the invention provides a method for the specific destruction of cells (e.g., the destruction of aberrant pancreatic cells, including, but not limited to, pancreatic tumor cells) by administering polypeptides of the invention (e.g., pancreatic antigen polypeptides or fragments thereof, or anti-pancreatic antigen antibodies) in association with toxins or cytotoxic prodrugs.

[0419] By “toxin” is meant compounds that bind and activate endogenous cytotoxic effector systems, radioisotopes, holotoxins, modified toxins, catalytic subunits of toxins, cytotoxins (cytotoxic agents), or any molecules or enzymes not normally present in or on the surface of a cell that under defined conditions cause the cell's death. Toxins that may be used according to the methods of the invention include, but are not limited to, radioisotopes known in the art, compounds such as, for example, antibodies (or complement fixing containing portions thereof) that bind an inherent or induced endogenous cytotoxic effector system, thymidine kinase, endonuclease, RNAse, alpha toxin, ricin, abrin, Pseudomonas exotoxin A, diphtheria toxin, saporin, momordin, gelonin, pokeweed antiviral protein, alpha-sarcin and cholera toxin. “Toxin” also includes a cytostatic or cytocidal agent, a therapeutic agent or a radioactive metal ion, e.g., alpha-emitters such as, for example, ²¹³Bi, or other radioisotopes such as, for example, ¹⁰³Pd, ¹³³Xe, ¹³¹I, ⁶⁸Ge, ⁵⁷Co, ⁶⁵Zn, ⁸⁵Sr, ³²P, ³⁵S, ⁹⁰Y, ¹⁵³Sm, ¹⁵³Gd, ¹⁶⁹Yb, ⁵¹Cr, ⁵⁴Mn, ⁷⁵Se, ¹¹³Sn, ⁹⁰Yttrium, ¹¹⁷Tin, ¹⁸⁶Rhenium, ¹⁶⁶Holmium, and ¹⁸⁸Rhenium; luminescent labels, such as luminol; and fluorescent labels, such as fluorescein and rhodamine, and biotin.

[0420] Techniques known in the art may be applied to label antibodies of the invention. Such techniques include, but are not limited to, the use of bifunctional conjugating agents (see e.g., U.S. Pat. Nos. 5,756,065; 5,714,631; 5,696,239; 5,652,361; 5,505,931; 5,489,425; 5,435,990; 5,428,139; 5,342,604; 5,274,119; 4,994,560; and 5,808,003; the contents of each of which are hereby incorporated by reference in its entirety). A cytotoxin or cytotoxic agent includes any agent that is detrimental to cells. Examples include paclitaxol, cytochalasin B, gramicidin D, ethidium bromide, emetine, mitomycin, etoposide, tenoposide, vincristine, vinblastine, colchicin, doxorubicin, daunorubicin, dihydroxy anthracin dione, mitoxantrone, mithramycin, actinomycin D, 1-dehydrotestosterone, glucocorticoids, procaine, tetracaine, lidocaine, propranolol, and puromycin and analogs or homologs thereof. Therapeutic agents include, but are not limited to, antimetabolites (e.g., methotrexate, 6-mercaptopurine, 6-thioguanine, cytarabine, 5-fluorouracil decarbazine), alkylating agents (e.g., mechlorethamine, thioepa chlorambucil, melphalan, carmustine (BSNU) and lomustine (CCNU), cyclothosphamide, busulfan, dibromomannitol, streptozotocin, mitomycin C, and cis-dichlorodiamine platinum (II) (DDP) cisplatin), anthracyclines (e.g., daunorubicin (formerly daunomycin) and doxorubicin), antibiotics (e.g., dactinomycin (formerly actinomycin), bleomycin, mithramycin, and anthramycin (AMC)), and anti-mitotic agents (e.g., vincristine and vinblastine).

[0421] By “cytotoxic prodrug” is meant a non-toxic compound that is converted by an enzyme, normally present in the cell, into a cytotoxic compound. Cytotoxic prodrugs that may be used according to the methods of the invention include, but are not limited to, glutamyl derivatives of benzoic acid mustard alkylating agent, phosphate derivatives of etoposide or mitomycin C, cytosine arabinoside, daunorubisin, and phenoxyacetamide derivatives of doxorubicin.

[0422] It will be appreciated that conditions caused by a decrease in the standard or normal level of a pancreatic antigen activity in an individual, particularly disorders of the pancreas, can be treated by administration of a pancreatic antigen polypeptide (e.g., such as, for example, the complete pancreatic antigen polypeptide, the soluble form of the extracellular domain of a pancreatic antigen polypeptide, or cells expressing the complete protein) or agonist. Thus, the invention also provides a method of treatment of an individual in need of an increased level of pancreatic antigen activity comprising administering to such an individual a pharmaceutical composition comprising an amount of an isolated pancreatic antigen polypeptide of the invention, or agonist thereof (e.g., an agonistic anti-pancreatic antigen antibody), effective to increase the pancreatic antigen activity level in such an individual.

[0423] It will also be appreciated that conditions caused by a increase in the standard or normal level of pancreatic antigen activity in an individual, particularly disorders of the pancreas, can be treated by administration of pancreatic antigen polypeptides (e.g., such as, for example, the complete pancreatic antigen polypeptide, the soluble form of the extracellular domain of a pancreatic antigen polypeptide, or cells expressing the complete protein) or antagonist (e.g., an antagonistic pancreatic antigen antibody). Thus, the invention also provides a method of treatment of an individual in need of an decreased level of pancreatic antigen activity comprising administering to such an individual a pharmaceutical composition comprising an amount of an isolated pancreatic antigen polypeptide of the invention, or antagonist thereof (e.g., an antagonistic anti-pancreatic antigen antibody), effective to decrease the pancreatic antigen activity level in such an individual.

[0424] More generally, polynucleotides, translation products and antibodies corresponding to this gene may be useful for the diagnosis, prognosis, prevention, and/or treatment of diseases and/or disorders associated with the following systems.

[0425] Endocrine Disorders

[0426] Polynucleotides or polypeptides, or agonists or antagonists of the present invention, may be used to treat, prevent, diagnose, and/or prognose disorders and/or diseases related to hormone imbalance, and/or disorders or diseases of the endocrine system.

[0427] Hormones secreted by the glands of the endocrine system control physical growth, sexual function, metabolism, and other functions. Disorders may be classified in two ways: disturbances in the production of hormones, and the inability of tissues to respond to hormones. The etiology of these hormone imbalance or endocrine system diseases, disorders or conditions may be genetic, somatic, such as cancer and some autoimmune diseases, acquired (e.g., by chemotherapy, injury or toxins), or infectious. Moreover, polynucleotides, polypeptides, antibodies, and/or agonists or antagonists of the present invention can be used as a marker or detector of a particular disease or disorder related to the endocrine system and/or hormone imbalance.

[0428] Endocrine system and/or hormone imbalance and/or diseases encompass disorders of uterine motility including, but not limited to: complications with pregnancy and labor (e.g., pre-term labor, post-term pregnancy, spontaneous abortion, and slow or stopped labor); and disorders and/or diseases of the menstrual cycle (e.g., dysmenorrhea and endometriosis).

[0429] Endocrine system and/or hormone imbalance disorders and/or diseases include disorders and/or diseases of the pancreas, such as, for example, diabetes mellitus, diabetes insipidus, congenital pancreatic agenesis, pheochromocytoma—islet cell tumor syndrome; disorders and/or diseases of the adrenal glands such as, for example, Addison's Disease, corticosteroid deficiency, virilizing disease, hirsutism, Cushing's Syndrome, hyperaldosteronism, pheochromocytoma; disorders and/or diseases of the pituitary gland, such as, for example, hyperpituitarism, hypopituitarism, pituitary dwarfism, pituitary adenoma, panhypopituitarism, acromegaly, gigantism; disorders and/or diseases of the thyroid, including but not limited to, hyperthyroidism, hypothyroidism, Plummer's disease, Graves' disease (toxic diffuse goiter), toxic nodular goiter, thyroiditis (Hashimoto's thyroiditis, subacute granulomatous thyroiditis, and silent lymphocytic thyroiditis), Pendred's syndrome, myxedema, cretinism, thyrotoxicosis, thyroid hormone coupling defect, thymic aplasia, Hurthle cell tumours of the thyroid, thyroid cancer, thyroid carcinoma, Medullary thyroid carcinoma; disorders and/or diseases of the parathyroid, such as, for example, hyperparathyroidism, hypoparathyroidism; disorders and/or diseases of the hypothalamus.

[0430] In addition, endocrine system and/or hormone imbalance disorders and/or diseases may also include disorders and/or diseases of the testes or ovaries, including cancer. Other disorders and/or diseases of the testes or ovaries further include, for example, ovarian cancer, polycystic ovary syndrome, Klinefelter's syndrome, vanishing testes syndrome (bilateral anorchia), congenital absence of Leydig's cells, cryptorchidism, Noonan's syndrome, myotonic dystrophy, capillary haemangioma of the testis (benign), neoplasias of the testis and neo-testis.

[0431] Moreover, endocrine system and/or hormone imbalance disorders and/or diseases may also include disorders and/or diseases such as, for example, polyglandular deficiency syndromes, pheochromocytoma, neuroblastoma, multiple Endocrine neoplasia, and disorders and/or cancers of endocrine tissues.

[0432] Immune Activity

[0433] Polynucleotides, polypeptides, antibodies, and/or agonists or antagonists of the present invention may be useful in treating, preventing, diagnosing and/or prognosing diseases, disorders, and/or conditions of the immune system, by, for example, activating or inhibiting the proliferation, differentiation, or mobilization (chemotaxis) of immune cells. Immune cells develop through a process called hematopoiesis, producing myeloid (platelets, red blood cells, neutrophils, and macrophages) and lymphoid (B and T lymphocytes) cells from pluripotent stem cells. The etiology of these immune diseases, disorders, and/or conditions may be genetic, somatic, such as cancer and some autoimmune diseases, acquired (e.g., by chemotherapy or toxins), or infectious. Moreover, polynucleotides, polypeptides, antibodies, and/or agonists or antagonists of the present invention can be used as a marker or detector of a particular immune system disease or disorder.

[0434] Polynucleotides, polypeptides, antibodies, and/or agonists or antagonists of the present invention may be useful in treating, preventing, diagnosing, and/or prognosing immunodeficiencies, including both congenital and acquired immunodeficiencies. Examples of B cell immunodeficiencies in which immunoglobulin levels B cell function and/or B cell numbers are decreased include: X-linked agammaglobulinemia (Bruton's disease), X-linked infantile agammaglobulinemia, X-linked immunodeficiency with hyper IgM, non X-linked immunodeficiency with hyper IgM, X-linked lymphoproliferative syndrome (XLP), agammaglobulinemia including congenital and acquired agammaglobulinemia, adult onset agammaglobulinemia, late-onset agammaglobulinemia, dysgammaglobulinemia, hypogammaglobulinemia, unspecified hypogammaglobulinemia, recessive agammaglobulinemia (Swiss type), Selective IgM deficiency, selective IgA deficiency, selective IgG subclass deficiencies, IgG subclass deficiency (with or without IgA deficiency), Ig deficiency with increased IgM, IgG and IgA deficiency with increased IgM, antibody deficiency with normal or elevated Igs, Ig heavy chain deletions, kappa chain deficiency, B cell lymphoproliferative disorder (BLPD), common variable immunodeficiency (CVID), common variable immunodeficiency (CVI) (acquired), and transient hypogammaglobulinemia of infancy.

[0435] In specific embodiments, ataxia-telangiectasia or conditions associated with ataxia-telangiectasia are treated, prevented, diagnosed, and/or prognosing using the polypeptides or polynucleotides of the invention, and/or agonists or antagonists thereof.

[0436] Examples of congenital immunodeficiencies in which T cell and/or B cell function and/or number is decreased include, but are not limited to: DiGeorge anomaly, severe combined immunodeficiencies (SCID) (including, but not limited to, X-linked SCID, autosomal recessive SCID, adenosine deaminase deficiency, purine nucleoside phosphorylase (PNP) deficiency, Class II MHC deficiency (Bare lymphocyte syndrome), Wiskott-Aldrich syndrome, and ataxia telangiectasia), thymic hypoplasia, third and fourth pharyngeal pouch syndrome, 22q11.2 deletion, chronic mucocutaneous candidiasis, natural killer cell deficiency (NK), idiopathic CD4+ T-lymphocytopenia, immunodeficiency with predominant T cell defect (unspecified), and unspecified immunodeficiency of cell mediated immunity.

[0437] In specific embodiments, DiGeorge anomaly or conditions associated with DiGeorge anomaly are treated, prevented, diagnosed, and/or prognosed using polypeptides or polynucleotides of the invention, or antagonists or agonists thereof.

[0438] Other immunodeficiencies that may be treated, prevented, diagnosed, and/or prognosed using polypeptides or polynucleotides of the invention, and/or agonists or antagonists thereof, include, but are not limited to, chronic granulomatous disease, Chédiak-Higashi syndrome, myeloperoxidase deficiency, leukocyte glucose-6-phosphate dehydrogenase deficiency, X-linked lymphoproliferative syndrome (XLP), leukocyte adhesion deficiency, complement component deficiencies (including C1, C2, C3, C4, C5, C6, C7, C8 and/or C9 deficiencies), reticular dysgenesis, thymic alymphoplasia-aplasia, immunodeficiency with thymoma, severe congenital leukopenia, dysplasia with immunodeficiency, neonatal neutropenia, short limbed dwarfism, and Nezelof syndrome-combined immunodeficiency with Igs.

[0439] In a preferred embodiment, the immunodeficiencies and/or conditions associated with the immunodeficiencies recited above are treated, prevented, diagnosed and/or prognosed using polynucleotides, polypeptides, antibodies, and/or agonists or antagonists of the present invention.

[0440] In a preferred embodiment polynucleotides, polypeptides, antibodies, and/or agonists or antagonists of the present invention could be used as an agent to boost immunoresponsiveness among immunodeficient individuals. In specific embodiments, polynucleotides, polypeptides, antibodies, and/or agonists or antagonists of the present invention could be used as an agent to boost immunoresponsiveness among B cell and/or T cell immunodeficient individuals.

[0441] The polynucleotides, polypeptides, antibodies, and/or agonists or antagonists of the present invention may be useful in treating, preventing, diagnosing and/or prognosing autoimmune disorders. Many autoimmune disorders result from inappropriate recognition of self as foreign material by immune cells. This inappropriate recognition results in an immune response leading to the destruction of the host tissue. Therefore, the administration of polynucleotides and polypeptides of the invention that can inhibit an immune response, particularly the proliferation, differentiation, or chemotaxis of T-cells, may be an effective therapy in preventing autoimmune disorders.

[0442] Autoimmune diseases or disorders that may be treated, prevented, diagnosed and/or prognosed by polynucleotides, polypeptides, antibodies, and/or agonists or antagonists of the present invention include, but are not limited to, one or more of the following: systemic lupus erythematosus, rheumatoid arthritis, ankylosing spondylitis, multiple sclerosis, autoimmune thyroiditis, Hashimoto's thyroiditis, autoimmune hemolytic anemia, hemolytic anemia, thrombocytopenia, autoimmune thrombocytopenia purpura, autoimmune neonatal thrombocytopenia, idiopathic thrombocytopenia purpura, purpura (e.g., Henloch-Scoenlein purpura), autoimmunocytopenia, Goodpasture's syndrome, Pemphigus vulgaris, myasthenia gravis, Grave's disease (hyperthyroidism), and insulin-resistant diabetes mellitus.

[0443] Additional disorders that are likely to have an autoimmune component that may be treated, prevented, and/or diagnosed with the compositions of the invention include, but are not limited to, type II collagen-induced arthritis, antiphospholipid syndrome, dermatitis, allergic encephalomyelitis, myocarditis, relapsing polychondritis, rheumatic heart disease, neuritis, uveitis ophthalmia, polyendocrinopathies, Reiter's Disease, Stiff-Man Syndrome, autoimmune pulmonary inflammation, autism, Guillain-Barre Syndrome, insulin dependent diabetes mellitus, and autoimmune inflammatory eye disorders.

[0444] Additional disorders that are likely to have an autoimmune component that may be treated, prevented, diagnosed and/or prognosed with the compositions of the invention include, but are not limited to, scleroderma with anti-collagen antibodies (often characterized, e.g., by nucleolar and other nuclear antibodies), mixed connective tissue disease (often characterized, e.g., by antibodies to extractable nuclear antigens (e.g., ribonucleoprotein)), polymyositis (often characterized, e.g., by nonhistone ANA), pernicious anemia (often characterized, e.g., by antiparietal cell, microsomes, and intrinsic factor antibodies), idiopathic Addison's disease (often characterized, e.g., by humoral and cell-mediated adrenal cytotoxicity, infertility (often characterized, e.g., by antispermatozoal antibodies), glomerulonephritis (often characterized, e.g., by glomerular basement membrane antibodies or immune complexes), bullous pemphigoid (often characterized, e.g., by IgG and complement in basement membrane), Sjogren's syndrome (often characterized, e.g., by multiple tissue antibodies, and/or a specific nonhistone ANA (SS-B)), diabetes mellitus (often characterized, e.g., by cell-mediated and humoral islet cell antibodies), and adrenergic drug resistance (including adrenergic drug resistance with asthma or cystic fibrosis) (often characterized, e.g., by beta-adrenergic receptor antibodies).

[0445] Additional disorders that may have an autoimmune component that may be treated, prevented, diagnosed and/or prognosed with the compositions of the invention include, but are not limited to, chronic active hepatitis (often characterized, e.g., by smooth muscle antibodies), primary biliary cirrhosis (often characterized, e.g., by mitochondria antibodies), other endocrine gland failure (often characterized, e.g., by specific tissue antibodies in some cases), vitiligo (often characterized, e.g., by melanocyte antibodies), vasculitis (often characterized, e.g., by Ig and complement in vessel walls and/or low serum complement), post-MI (often characterized, e.g., by myocardial antibodies), cardiotomy syndrome (often characterized, e.g., by myocardial antibodies), urticaria (often characterized, e.g., by IgG and IgM antibodies to IgE), atopic dermatitis (often characterized, e.g., by IgG and IgM antibodies to IgE), asthma (often characterized, e.g., by IgG and IgM antibodies to IgE), and many other inflammatory, granulomatous, degenerative, and atrophic disorders.

[0446] In a preferred embodiment, the autoimmune diseases and disorders and/or conditions associated with the diseases and disorders recited above are treated, prevented, diagnosed and/or prognosed using for example, antagonists or agonists, polypeptides or polynucleotides, or antibodies of the present invention. In a specific preferred embodiment, rheumatoid arthritis is treated, prevented, and/or diagnosed using polynucleotides, polypeptides, antibodies, and/or agonists or antagonists of the present invention.

[0447] In another specific preferred embodiment, systemic lupus erythematosus is treated, prevented, and/or diagnosed using polynucleotides, polypeptides, antibodies, and/or agonists or antagonists of the present invention. In another specific preferred embodiment, idiopathic thrombocytopenia purpura is treated, prevented, and/or diagnosed using polynucleotides, polypeptides, antibodies, and/or agonists or antagonists of the present invention.

[0448] In another specific preferred embodiment IgA nephropathy is treated, prevented, and/or diagnosed using polynucleotides, polypeptides, antibodies, and/or agonists or antagonists of the present invention.

[0449] In a preferred embodiment, the autoimmune diseases and disorders and/or conditions associated with the diseases and disorders recited above are treated, prevented, diagnosed and/or prognosed using polynucleotides, polypeptides, antibodies, and/or agonists or antagonists of the present invention.

[0450] In preferred embodiments, polypeptides, antibodies, polynucleotides and/or agonists or antagonists of the present invention are used as a immunosuppressive agent(s).

[0451] Polynucleotides, polypeptides, antibodies, and/or agonists or antagonists of the present invention may be useful in treating, preventing, prognosing, and/or diagnosing diseases, disorders, and/or conditions of hematopoietic cells. Polynucleotides, polypeptides, antibodies, and/or agonists or antagonists of the present invention could be used to increase differentiation and proliferation of hematopoietic cells, including the pluripotent stem cells, in an effort to treat or prevent those diseases, disorders, and/or conditions associated with a decrease in certain (or many) types hematopoietic cells, including but not limited to, leukopenia, neutropenia, anemia, and thrombocytopenia. Alternatively, Polynucleotides, polypeptides, antibodies, and/or agonists or antagonists of the present invention could be used to increase differentiation and proliferation of hematopoietic cells, including the pluripotent stem cells, in an effort to treat or prevent those diseases, disorders, and/or conditions associated with an increase in certain (or many) types of hematopoietic cells, including but not limited to, histiocytosis.

[0452] Allergic reactions and conditions, such as asthma (particularly allergic asthma) or other respiratory problems, may also be treated, prevented, diagnosed and/or prognosed using polypeptides, antibodies, or polynucleotides of the invention, and/or agonists or antagonists thereof. Moreover, these molecules can be used to treat, prevent, prognose, and/or diagnose anaphylaxis, hypersensitivity to an antigenic molecule, or blood group incompatibility.

[0453] Additionally, polypeptides or polynucleotides of the invention, and/or agonists or antagonists thereof, may be used to treat, prevent, diagnose and/or prognose IgE-mediated allergic reactions. Such allergic reactions include, but are not limited to, asthma, rhinitis, and eczema. In specific embodiments, polynucleotides, polypeptides, antibodies, and/or agonists or antagonists of the present invention may be used to modulate IgE concentrations in vitro or in vivo.

[0454] Moreover, polynucleotides, polypeptides, antibodies, and/or agonists or antagonists of the present invention have uses in the diagnosis, prognosis, prevention, and/or treatment of inflammatory conditions. For example, since polypeptides, antibodies, or polynucleotides of the invention, and/or agonists or antagonists of the invention may inhibit the activation, proliferation and/or differentiation of cells involved in an inflammatory response, these molecules can be used to prevent and/or treat chronic and acute inflammatory conditions. Such inflammatory conditions include, but are not limited to, for example, inflammation associated with infection (e.g., septic shock, sepsis, or systemic inflammatory response syndrome), ischemia-reperfusion injury, endotoxin lethality, complement-mediated hyperacute rejection, nephritis, cytokine or chemokine induced lung injury, inflammatory bowel disease, Crohn's disease, over production of cytokines (e.g., TNF or IL-1.), respiratory disorders (e.g., asthma and allergy); gastrointestinal disorders (e.g., inflammatory bowel disease); cancers (e.g., gastric, ovarian, lung, bladder, liver, and breast); CNS disorders (e.g., multiple sclerosis; ischemic brain injury and/or stroke, traumatic brain injury, neurodegenerative disorders (e.g., Parkinson's disease and Alzheimer's disease); AIDS-related dementia; and prion disease); cardiovascular disorders (e.g., atherosclerosis, myocarditis, cardiovascular disease, and cardiopulmonary bypass complications); as well as many additional diseases, conditions, and disorders that are characterized by inflammation (e.g., hepatitis, rheumatoid arthritis, gout, trauma, pancreatitis, sarcoidosis, dermatitis, renal ischemia-reperfusion injury, Grave's disease, systemic lupus erythematosus, diabetes mellitus, and allogenic transplant rejection).

[0455] Because inflammation is a fundamental defense mechanism, inflammatory disorders can effect virtually any tissue of the body. Accordingly, polynucleotides, polypeptides, and antibodies of the invention, as well as agonists or antagonists thereof, have uses in the treatment of tissue-specific inflammatory disorders, including, but not limited to, adrenalitis, alveolitis, angiocholecystitis, appendicitis, balanitis, blepharitis, bronchitis, bursitis, carditis, cellulitis, cervicitis, cholecystitis, chorditis, cochlitis, colitis, conjunctivitis, cystitis, dermatitis, diverticulitis, encephalitis, endocarditis, esophagitis, eustachitis, fibrositis, folliculitis, gastritis, gastroenteritis, gingivitis, glossitis, hepatosplenitis, keratitis, labyrinthitis, laryngitis, lymphangitis, mastitis, media otitis, meningitis, metritis, mucitis, myocarditis, myosititis, myringitis, nephritis, neuritis, orchitis, osteochondritis, otitis, pericarditis, peritendonitis, peritonitis, pharyngitis, phlebitis, poliomyelitis, prostatitis, pulpitis, retinitis, rhinitis, salpingitis, scleritis, sclerochoroiditis, scrotitis, sinusitis, spondylitis, steatitis, stomatitis, synovitis, syringitis, tendonitis, tonsillitis, urethritis, and vaginitis.

[0456] In specific embodiments, polypeptides, antibodies, or polynucleotides of the invention, and/or agonists or antagonists thereof, are useful to diagnose, prognose, prevent, and/or treat organ transplant rejections and graft-versus-host disease. Organ rejection occurs by host immune cell destruction of the transplanted tissue through an immune response. Similarly, an immune response is also involved in GVHD, but, in this case, the foreign transplanted immune cells destroy the host tissues. Polypeptides, antibodies, or polynucleotides of the invention, and/or agonists or antagonists thereof, that inhibit an immune response, particularly the activation, proliferation, differentiation, or chemotaxis of T-cells, may be an effective therapy in preventing organ rejection or GVHD. In specific embodiments, polypeptides, antibodies, or polynucleotides of the invention, and/or agonists or antagonists thereof, that inhibit an immune response, particularly the activation, proliferation, differentiation, or chemotaxis of T-cells, may be an effective therapy in preventing experimental allergic and hyperacute xenograft rejection.

[0457] In other embodiments, polypeptides, antibodies, or polynucleotides of the invention, and/or agonists or antagonists thereof, are useful to diagnose, prognose, prevent, and/or treat immune complex diseases, including, but not limited to, serum sickness, post streptococcal glomerulonephritis, polyarteritis nodosa, and immune complex-induced vasculitis.

[0458] Polypeptides, antibodies, polynucleotides and/or agonists or antagonists of the invention can be used to treat, detect, and/or prevent infectious agents. For example, by increasing the immune response, particularly increasing the proliferation activation and/or differentiation of B and/or T cells, infectious diseases may be treated, detected, and/or prevented. The immune response may be increased by either enhancing an existing immune response, or by initiating a new immune response. Alternatively, polynucleotides, polypeptides, antibodies, and/or agonists or antagonists of the present invention may also directly inhibit the infectious agent (refer to section of application listing infectious agents, etc), without necessarily eliciting an immune response.

[0459] In another embodiment, polypeptides, antibodies, polynucleotides and/or agonists or antagonists of the present invention are used as a vaccine adjuvant that enhances immune responsiveness to an antigen. In a specific embodiment, polypeptides, antibodies, polynucleotides and/or agonists or antagonists of the present invention are used as an adjuvant to enhance tumor-specific immune responses.

[0460] In another specific embodiment, polypeptides, antibodies, polynucleotides and/or agonists or antagonists of the present invention are used as an adjuvant to enhance anti-viral immune responses. Anti-viral immune responses that may be enhanced using the compositions of the invention as an adjuvant, include virus and virus associated diseases or symptoms described herein or otherwise known in the art. In specific embodiments, the compositions of the invention are used as an adjuvant to enhance an immune response to a virus, disease, or symptom selected from the group consisting of: AIDS, meningitis, Dengue, EBV, and hepatitis (e.g., hepatitis B). In another specific embodiment, the compositions of the invention are used as an adjuvant to enhance an immune response to a virus, disease, or symptom selected from the group consisting of: HIV/AIDS, respiratory syncytial virus, Dengue, rotavirus, Japanese B encephalitis, influenza A and B, parainfluenza, measles, cytomegalovirus, rabies, Junin, Chikungunya, Rift Valley Fever, herpes simplex, and yellow fever.

[0461] In another specific embodiment, polypeptides, antibodies, polynucleotides and/or agonists or antagonists of the present invention are used as an adjuvant to enhance anti-bacterial or anti-fungal immune responses. Anti-bacterial or anti-fungal immune responses that may be enhanced using the compositions of the invention as an adjuvant, include bacteria or fungus and bacteria or fungus associated diseases or symptoms described herein or otherwise known in the art. In specific embodiments, the compositions of the invention are used as an adjuvant to enhance an immune response to a bacteria or fungus, disease, or symptom selected from the group consisting of: tetanus, Diphtheria, botulism, and meningitis type B.

[0462] In another specific embodiment, the compositions of the invention are used as an adjuvant to enhance an immune response to a bacteria or fungus, disease, or symptom selected from the group consisting of: Vibrio cholerae, Mycobacterium leprae, Salmonella typhi, Salmonella paratyphi, Meisseria meningitidis, Streptococcus pneumoniae, Group B streptococcus, Shigella spp., Enterotoxigenic Escherichia coli, Enterohemorrhagic E. coli, and Borrelia burgdorferi.

[0463] In another specific embodiment, polypeptides, antibodies, polynucleotides and/or agonists or antagonists of the present invention are used as an adjuvant to enhance anti-parasitic immune responses. Anti-parasitic immune responses that may be enhanced using the compositions of the invention as an adjuvant, include parasite and parasite associated diseases or symptoms described herein or otherwise known in the art. In specific embodiments, the compositions of the invention are used as an adjuvant to enhance an immune response to a parasite. In another specific embodiment, the compositions of the invention are used as an adjuvant to enhance an immune response to Plasmodium (malaria) or Leishmania.

[0464] In another specific embodiment, polypeptides, antibodies, polynucleotides and/or agonists or antagonists of the present invention may also be employed to treat infectious diseases including silicosis, sarcoidosis, and idiopathic pulmonary fibrosis; for example, by preventing the recruitment and activation of mononuclear phagocytes.

[0465] In another specific embodiment, polypeptides, antibodies, polynucleotides and/or agonists or antagonists of the present invention are used as an antigen for the generation of antibodies to inhibit or enhance immune mediated responses against polypeptides of the invention.

[0466] In one embodiment, polypeptides, antibodies, polynucleotides and/or agonists or antagonists of the present invention are administered to an animal (e.g., mouse, rat, rabbit, hamster, guinea pig, pigs, micro-pig, chicken, camel, goat, horse, cow, sheep, dog, cat, non-human primate, and human, most preferably human) to boost the immune system to produce increased quantities of one or more antibodies (e.g., IgG, IgA, IgM, and IgE), to induce higher affinity antibody production and immunoglobulin class switching (e.g., IgG, IgA, IgM, and IgE), and/or to increase an immune response.

[0467] In another specific embodiment, polypeptides, antibodies, polynucleotides and/or agonists or antagonists of the present invention are used as a stimulator of B cell responsiveness to pathogens.

[0468] In another specific embodiment, polypeptides, antibodies, polynucleotides and/or agonists or antagonists of the present invention are used as an activator of T cells.

[0469] In another specific embodiment, polypeptides, antibodies, polynucleotides and/or agonists or antagonists of the present invention are used as an agent that elevates the immune status of an individual prior to their receipt of immunosuppressive therapies.

[0470] In another specific embodiment, polypeptides, antibodies, polynucleotides and/or agonists or antagonists of the present invention are used as an agent to induce higher affinity antibodies.

[0471] In another specific embodiment, polypeptides, antibodies, polynucleotides and/or agonists or antagonists of the present invention are used as an agent to increase serum immunoglobulin concentrations.

[0472] In another specific embodiment, polypeptides, antibodies, polynucleotides and/or agonists or antagonists of the present invention are used as an agent to accelerate recovery of immunocompromised individuals.

[0473] In another specific embodiment, polypeptides, antibodies, polynucleotides and/or agonists or antagonists of the present invention are used as an agent to boost immunoresponsiveness among aged populations and/or neonates.

[0474] In another specific embodiment, polypeptides, antibodies, polynucleotides and/or agonists or antagonists of the present invention are used as an immune system enhancer prior to, during, or after bone marrow transplant and/or other transplants (e.g., allogeneic or xenogeneic organ transplantation). With respect to transplantation, compositions of the invention may be administered prior to, concomitant with, and/or after transplantation. In a specific embodiment, compositions of the invention are administered after transplantation, prior to the beginning of recovery of T-cell populations. In another specific embodiment, compositions of the invention are first administered after transplantation after the beginning of recovery of T cell populations, but prior to full recovery of B cell populations.

[0475] In another specific embodiment, polypeptides, antibodies, polynucleotides and/or agonists or antagonists of the present invention are used as an agent to boost immunoresponsiveness among individuals having an acquired loss of B cell function. Conditions resulting in an acquired loss of B cell function that may be ameliorated or treated by administering the polypeptides, antibodies, polynucleotides and/or agonists or antagonists thereof, include, but are not limited to, HIV Infection, AIDS, bone marrow transplant, and B cell chronic lymphocytic leukemia (CLL).

[0476] In another specific embodiment, polypeptides, antibodies, polynucleotides and/or agonists or antagonists of the present invention are used as an agent to boost immunoresponsiveness among individuals having a temporary immune deficiency. Conditions resulting in a temporary immune deficiency that may be ameliorated or treated by administering the polypeptides, antibodies, polynucleotides and/or agonists or antagonists thereof, include, but are not limited to, recovery from viral infections (e.g., influenza), conditions associated with malnutrition, recovery from infectious mononucleosis, or conditions associated with stress, recovery from measles, recovery from blood transfusion, and recovery from surgery.

[0477] In another specific embodiment, polypeptides, antibodies, polynucleotides and/or agonists or antagonists of the present invention are used as a regulator of antigen presentation by monocytes, dendritic cells, and/or B-cells. In one embodiment, polynucleotides, polypeptides, antibodies, and/or agonists or antagonists of the present invention enhance antigen presentation or antagonizes antigen presentation in vitro or in vivo. Moreover, in related embodiments, said enhancement or antagonism of antigen presentation may be useful as an anti-tumor treatment or to modulate the immune system.

[0478] In another specific embodiment, polypeptides, antibodies, polynucleotides and/or agonists or antagonists of the present invention are used as an agent to direct an individual's immune system towards development of a humoral response (i.e. TH2) as opposed to a TH1 cellular response.

[0479] In another specific embodiment, polypeptides, antibodies, polynucleotides and/or agonists or antagonists of the present invention are used as a means to induce tumor proliferation and thus make it more susceptible to anti-neoplastic agents. For example, multiple myeloma is a slowly dividing disease and is thus refractory to virtually all anti-neoplastic regimens. If these cells were forced to proliferate more rapidly their susceptibility profile would likely change.

[0480] In another specific embodiment, polypeptides, antibodies, polynucleotides and/or agonists or antagonists of the present invention are used as a stimulator of B cell production in pathologies such as AIDS, chronic lymphocyte disorder and/or Common Variable Immunodeficiency.

[0481] In another specific embodiment, polypeptides, antibodies, polynucleotides and/or agonists or antagonists of the present invention are used as a therapy for generation and/or regeneration of lymphoid tissues following surgery, trauma or genetic defect. In another specific embodiment, polypeptides, antibodies, polynucleotides and/or agonists or antagonists of the present invention are used in the pretreatment of bone marrow samples prior to transplant.

[0482] In another specific embodiment, polypeptides, antibodies, polynucleotides and/or agonists or antagonists of the present invention are used as a gene-based therapy for genetically inherited disorders resulting in immuno-incompetence/immunodeficiency such as observed among SCID patients.

[0483] In another specific embodiment, polypeptides, antibodies, polynucleotides and/or agonists or antagonists of the present invention are used as a means of activating monocytes/macrophages to defend against parasitic diseases that effect monocytes such as Leishmania.

[0484] In another specific embodiment, polypeptides, antibodies, polynucleotides and/or agonists or antagonists of the present invention are used as a means of regulating secreted cytokines that are elicited by polypeptides of the invention.

[0485] In another embodiment, polypeptides, antibodies, polynucleotides and/or agonists or antagonists of the present invention are used in one or more of the applications described herein, as they may apply to veterinary medicine.

[0486] In another specific embodiment, polypeptides, antibodies, polynucleotides and/or agonists or antagonists of the present invention are used as a means of blocking various aspects of immune responses to foreign agents or self. Examples of diseases or conditions in which blocking of certain aspects of immune responses may be desired include autoimmune disorders such as lupus, and arthritis, as well as immunoresponsiveness to skin allergies, inflammation, bowel disease, injury and diseases/disorders associated with pathogens.

[0487] In another specific embodiment, polypeptides, antibodies, polynucleotides and/or agonists or antagonists of the present invention are used as a therapy for preventing the B cell proliferation and Ig secretion associated with autoimmune diseases such as idiopathic thrombocytopenic purpura, systemic lupus erythematosus and multiple sclerosis.

[0488] In another specific embodiment, polypeptides, antibodies, polynucleotides and/or agonists or antagonists of the present invention are used as a inhibitor of B and/or T cell migration in endothelial cells. This activity disrupts tissue architecture or cognate responses and is useful, for example in disrupting immune responses, and blocking sepsis.

[0489] In another specific embodiment, polypeptides, antibodies, polynucleotides and/or agonists or antagonists of the present invention are used as a therapy for chronic hypergammaglobulinemia evident in such diseases as monoclonal gammopathy of undetermined significance (MGUS), Waldenstrom's disease, related idiopathic monoclonal gammopathies, and plasmacytomas.

[0490] In another specific embodiment, polypeptides, antibodies, polynucleotides and/or agonists or antagonists of the present invention may be employed for instance to inhibit polypeptide chemotaxis and activation of macrophages and their precursors, and of neutrophils, basophils, B lymphocytes and some T-cell subsets, e.g., activated and CD8 cytotoxic T cells and natural killer cells, in certain autoimmune and chronic inflammatory and infective diseases. Examples of autoimmune diseases are described herein and include multiple sclerosis, and insulin-dependent diabetes.

[0491] The polypeptides, antibodies, polynucleotides and/or agonists or antagonists of the present invention may also be employed to treat idiopathic hyper-eosinophilic syndrome by, for example, preventing eosinophil production and migration.

[0492] In another specific embodiment, polypeptides, antibodies, polynucleotides and/or agonists or antagonists of the present invention are used to enhance or inhibit complement mediated cell lysis.

[0493] In another specific embodiment, polypeptides, antibodies, polynucleotides and/or agonists or antagonists of the present invention are used to enhance or inhibit antibody dependent cellular cytotoxicity.

[0494] In another specific embodiment, polypeptides, antibodies, polynucleotides and/or agonists or antagonists of the present invention may also be employed for treating atherosclerosis, for example, by preventing monocyte infiltration in the artery wall.

[0495] In another specific embodiment, polypeptides, antibodies, polynucleotides and/or agonists or antagonists of the present invention may be employed to treat adult respiratory distress syndrome (ARDS).

[0496] In another specific embodiment, polypeptides, antibodies, polynucleotides and/or agonists or antagonists of the present invention may be useful for stimulating wound and tissue repair, stimulating angiogenesis, and/or stimulating the repair of vascular or lymphatic diseases or disorders. Additionally, agonists and antagonists of the invention may be used to stimulate the regeneration of mucosal surfaces.

[0497] In a specific embodiment, polynucleotides or polypeptides, and/or agonists thereof are used to diagnose, prognose, treat, and/or prevent a disorder characterized by primary or acquired immunodeficiency, deficient serum immunoglobulin production, recurrent infections, and/or immune system dysfunction. Moreover, polynucleotides or polypeptides, and/or agonists thereof may be used to treat or prevent infections of the joints, bones, skin, and/or parotid glands, blood-borne infections (e.g., sepsis, meningitis, septic arthritis, and/or osteomyelitis), autoimmune diseases (e.g., those disclosed herein), inflammatory disorders, and malignancies, and/or any disease or disorder or condition associated with these infections, diseases, disorders and/or malignancies) including, but not limited to, CVID, other primary immune deficiencies, HIV disease, CLL, recurrent bronchitis, sinusitis, otitis media, conjunctivitis, pneumonia, hepatitis, meningitis, herpes zoster (e.g., severe herpes zoster), and/or pneumocystis carnii. Other diseases and disorders that may be prevented, diagnosed, prognosed, and/or treated with polynucleotides or polypeptides, and/or agonists of the present invention include, but are not limited to, HIV infection, HTLV-BLV infection, lymphopenia, phagocyte bactericidal dysfunction anemia, thrombocytopenia, and hemoglobinuria.

[0498] In another embodiment, polynucleotides, polypeptides, antibodies, and/or agonists or antagonists of the present invention are used to treat, and/or diagnose an individual having common variable immunodeficiency disease (“CVID”; also known as “acquired agammaglobulinemia” and “acquired hypogammaglobulinemia”) or a subset of this disease.

[0499] In a specific embodiment, polynucleotides, polypeptides, antibodies, and/or agonists or antagonists of the present invention may be used to diagnose, prognose, prevent, and/or treat cancers or neoplasms including immune cell or immune tissue-related cancers or neoplasms. Examples of cancers or neoplasms that may be prevented, diagnosed, or treated by polynucleotides, polypeptides, antibodies, and/or agonists or antagonists of the present invention include, but are not limited to, acute myelogenous leukemia, chronic myelogenous leukemia, Hodgkin's disease, non-Hodgkin's lymphoma, acute lymphocytic anemia (ALL) Chronic lymphocyte leukemia, plasmacytomas, multiple myeloma, Burkitt's lymphoma, EBV-transformed diseases, and/or diseases and disorders described in the section entitled “Hyperproliferative Disorders” elsewhere herein.

[0500] In another specific embodiment, polypeptides, antibodies, polynucleotides and/or agonists or antagonists of the present invention are used as a therapy for decreasing cellular proliferation of Large B-cell Lymphomas.

[0501] In another specific embodiment, polypeptides, antibodies, polynucleotides and/or agonists or antagonists of the present invention are used as a means of decreasing the involvement of B cells and Ig associated with Chronic Myelogenous Leukemia.

[0502] In specific embodiments, the compositions of the invention are used as an agent to boost immunoresponsiveness among B cell immunodeficient individuals, such as, for example, an individual who has undergone a partial or complete splenectomy.

[0503] Antagonists of the invention include, for example, binding and/or inhibitory antibodies, antisense nucleic acids, ribozymes or soluble forms of the polypeptides of the present invention (e.g., Fc fusion protein; see, e.g., Example 9). Agonists of the invention include, for example, binding or stimulatory antibodies, and soluble forms of the polypeptides (e.g., Fc fusion proteins; see, e.g., Example 9). Polypeptides, antibodies, polynucleotides and/or agonists or antagonists of the present invention may be employed in a composition with a pharmaceutically acceptable carrier, e.g., as described herein.

[0504] In another embodiment, polypeptides, antibodies, polynucleotides and/or agonists or antagonists of the present invention are administered to an animal (including, but not limited to, those listed above, and also including transgenic animals) incapable of producing functional endogenous antibody molecules or having an otherwise compromised endogenous immune system, but which is capable of producing human immunoglobulin molecules by means of a reconstituted or partially reconstituted immune system from another animal (see, e.g., published PCT Application Nos. WO98/24893, WO/9634096, WO/9633735, and WO/9110741). Administration of polypeptides, antibodies, polynucleotides and/or agonists or antagonists of the present invention to such animals is useful for the generation of monoclonal antibodies against the polypeptides, antibodies, polynucleotides and/or agonists or antagonists of the present invention.

[0505] Blood-Related Disorders

[0506] The polynucleotides, polypeptides, antibodies, and/or agonists or antagonists of the present invention may be used to modulate hemostatic (the stopping of bleeding) or thrombolytic (clot dissolving) activity. For example, by increasing hemostatic or thrombolytic activity, polynucleotides or polypeptides, and/or agonists or antagonists of the present invention could be used to treat or prevent blood coagulation diseases, disorders, and/or conditions (e.g., afibrinogenemia, factor deficiencies, hemophilia), blood platelet diseases, disorders, and/or conditions (e.g., thrombocytopenia), or wounds resulting from trauma, surgery, or other causes. Alternatively, polynucleotides, polypeptides, antibodies, and/or agonists or antagonists of the present invention that can decrease hemostatic or thrombolytic activity could be used to inhibit or dissolve clotting. These molecules could be important in the treatment or prevention of heart attacks (infarction), strokes, or scarring.

[0507] In specific embodiments, the polynucleotides, polypeptides, antibodies, and/or agonists or antagonists of the present invention may be used to prevent, diagnose, prognose, and/or treat thrombosis, arterial thrombosis, venous thrombosis, thromboembolism, pulmonary embolism, atherosclerosis, myocardial infarction, transient ischemic attack, unstable angina. In specific embodiments, the polynucleotides, polypeptides, antibodies, and/or agonists or antagonists of the present invention may be used for the prevention of occulsion of saphenous grafts, for reducing the risk of periprocedural thrombosis as might accompany angioplasty procedures, for reducing the risk of stroke in patients with atrial fibrillation including nonrheumatic atrial fibrillation, for reducing the risk of embolism associated with mechanical heart valves and or mitral valves disease. Other uses for the polynucleotides, polypeptides, antibodies, and/or agonists or antagonists of the present invention, include, but are not limited to, the prevention of occlusions in extrcorporeal devices (e.g., intravascular canulas, vascular access shunts in hemodialysis patients, hemodialysis machines, and cardiopulmonary bypass machines).

[0508] In another embodiment, a polypeptide of the invention, or polynucleotides, antibodies, agonists, or antagonists corresponding to that polypeptide, may be used to prevent, diagnose, prognose, and/or treat diseases and disorders of the blood and/or blood forming organs associated with the tissue(s) in which the polypeptide of the invention is expressed, including one, two, three, four, five, or more tissues disclosed in Table 1A, column 7 (Tissue Distribution Library Code).

[0509] The polynucleotides, polypeptides, antibodies, and/or agonists or antagonists of the present invention may be used to modulate hematopoietic activity (the formation of blood cells). For example, the polynucleotides, polypeptides, antibodies, and/or agonists or antagonists of the present invention may be used to increase the quantity of all or subsets of blood cells, such as, for example, erythrocytes, lymphocytes (B or T cells), myeloid cells (e.g., basophils, eosinophils, neutrophils, mast cells, macrophages) and platelets. The ability to decrease the quantity of blood cells or subsets of blood cells may be useful in the prevention, detection, diagnosis and/or treatment of anemias and leukopenias described below. Alternatively, the polynucleotides, polypeptides, antibodies, and/or agonists or antagonists of the present invention may be used to decrease the quantity of all or subsets of blood cells, such as, for example, erythrocytes, lymphocytes (B or T cells), myeloid cells (e.g., basophils, eosinophils, neutrophils, mast cells, macrophages) and platelets. The ability to decrease the quantity of blood cells or subsets of blood cells may be useful in the prevention, detection, diagnosis and/or treatment of leukocytoses, such as, for example eosinophilia.

[0510] The polynucleotides, polypeptides, antibodies, and/or agonists or antagonists of the present invention may be used to prevent, treat, or diagnose blood dyscrasia.

[0511] Anemias are conditions in which the number of red blood cells or amount of hemoglobin (the protein that carries oxygen) in them is below normal. Anemia may be caused by excessive bleeding, decreased red blood cell production, or increased red blood cell destruction (hemolysis). The polynucleotides, polypeptides, antibodies, and/or agonists or antagonists of the present invention may be useful in treating, preventing, and/or diagnosing anemias. Anemias that may be treated prevented or diagnosed by the polynucleotides, polypeptides, antibodies, and/or agonists or antagonists of the present invention include iron deficiency anemia, hypochromic anemia, microcytic anemia, chlorosis, hereditary sideroblastic anemia, idiopathic acquired sideroblastic anemia, red cell aplasia, megaloblastic anemia (e.g., pernicious anemia, (vitamin B12 deficiency) and folic acid deficiency anemia), aplastic anemia, hemolytic anemias (e.g., autoimmune helolytic anemia, microangiopathic hemolytic anemia, and paroxysmal nocturnal hemoglobinuria). The polynucleotides, polypeptides, antibodies, and/or agonists or antagonists of the present invention may be useful in treating, preventing, and/or diagnosing anemias associated with diseases including but not limited to, anemias associated with systemic lupus erythematosus, cancers, lymphomas, chronic renal disease, and enlarged spleens. The polynucleotides, polypeptides, antibodies, and/or agonists or antagonists of the present invention may be useful in treating, preventing, and/or diagnosing anemias arising from drug treatments such as anemias associated with methyldopa, dapsone, and/or sulfadrugs. Additionally, the polynucleotides, polypeptides, antibodies, and/or agonists or antagonists of the present invention may be useful in treating, preventing, and/or diagnosing anemias associated with abnormal red blood cell architecture including but not limited to, hereditary spherocytosis, hereditary elliptocytosis, glucose-6-phosphate dehydrogenase deficiency, and sickle cell anemia.

[0512] The polynucleotides, polypeptides, antibodies, and/or agonists or antagonists of the present invention may be useful in treating, preventing, and/or diagnosing hemoglobin abnormalities, (e.g., those associated with sickle cell anemia, hemoglobin C disease, hemoglobin S-C disease, and hemoglobin E disease). Additionally, the polynucleotides, polypeptides, antibodies, and/or agonists or antagonists of the present invention may be useful in diagnosing, prognosing, preventing, and/or treating thalassemias, including, but not limited to major and minor forms of alpha-thalassemia and beta-thalassemia.

[0513] In another embodiment, the polynucleotides, polypeptides, antibodies, and/or agonists or antagonists of the present invention may be useful in diagnosing, prognosing, preventing, and/or treating bleeding disorders including, but not limited to, thrombocytopenia (e.g., idiopathic thrombocytopenic purpura, and thrombotic thrombocytopenic purpura), Von Willebrand's disease, hereditary platelet disorders (e.g., storage pool disease such as Chediak-Higashi and Hermansky-Pudlak syndromes, thromboxane A2 dysfunction, thromboasthenia, and Bernard-Soulier syndrome), hemolytic-uremic syndrome, hemophelias such as hemophelia A or Factor VII deficiency and Christmas disease or Factor IX deficiency, Hereditary Hemorrhagic Telangiectasia, also known as Rendu-Osler-Weber syndrome, allergic purpura (Henoch Schonlein purpura) and disseminated intravascular coagulation.

[0514] The effect of the polynucleotides, polypeptides, antibodies, and/or agonists or antagonists of the present invention on the clotting time of blood may be monitored using any of the clotting tests known in the art including, but not limited to, whole blood partial thromboplastin time (PTT), the activated partial thromboplastin time (aPTT), the activated clotting time (ACT), the recalcified activated clotting time, or the Lee-White Clotting time.

[0515] Several diseases and a variety of drugs can cause platelet dysfunction. Thus, in a specific embodiment, the polynucleotides, polypeptides, antibodies, and/or agonists or antagonists of the present invention may be useful in diagnosing, prognosing, preventing, and/or treating acquired platelet dysfunction such as platelet dysfunction accompanying kidney failure, leukemia, multiple myeloma, cirrhosis of the liver, and systemic lupus erythematosus as well as platelet dysfunction associated with drug treatments, including treatment with aspirin, ticlopidine, nonsteroidal anti-inflammatory drugs (used for arthritis, pain, and sprains), and penicillin in high doses.

[0516] In another embodiment, the polynucleotides, polypeptides, antibodies, and/or agonists or antagonists of the present invention may be useful in diagnosing, prognosing, preventing, and/or treating diseases and disorders characterized by or associated with increased or decreased numbers of white blood cells. Leukopenia occurs when the number of white blood cells decreases below normal. Leukopenias include, but are not limited to, neutropenia and lymphocytopenia. An increase in the number of white blood cells compared to normal is known as leukocytosis. The body generates increased numbers of white blood cells during infection. Thus, leukocytosis may simply be a normal physiological parameter that reflects infection. Alternatively, leukocytosis may be an indicator of injury or other disease such as cancer. Leokocytoses, include but are not limited to, eosinophilia, and accumulations of macrophages. In specific embodiments, the polynucleotides, polypeptides, antibodies, and/or agonists or antagonists of the present invention may be useful in diagnosing, prognosing, preventing, and/or treating leukopenia. In other specific embodiments, the polynucleotides, polypeptides, antibodies, and/or agonists or antagonists of the present invention may be useful in diagnosing, prognosing, preventing, and/or treating leukocytosis

[0517] Leukopenia may be a generalized decreased in all types of white blood cells, or may be a specific depletion of particular types of white blood cells. Thus, in specific embodiments, the polynucleotides, polypeptides, antibodies, and/or agonists or antagonists of the present invention may be useful in diagnosing, prognosing, preventing, and/or treating decreases in neutrophil numbers, known as neutropenia. Neutropenias that may be diagnosed, prognosed, prevented, and/or treated by the polynucleotides, polypeptides, antibodies, and/or agonists or antagonists of the present invention include, but are not limited to, infantile genetic agranulocytosis, familial neutropenia, cyclic neutropenia, neutropenias resulting from or associated with dietary deficiencies (e.g., vitamin B12 deficiency or folic acid deficiency), neutropenias resulting from or associated with drug treatments (e.g., antibiotic regimens such as penicillin treatment, sulfonamide treatment, anticoagulant treatment, anticonvulsant drugs, anti-thyroid drugs, and cancer chemotherapy), and neutropenias resulting from increased neutrophil destruction that may occur in association with some bacterial or viral infections, allergic disorders, autoimmune diseases, conditions in which an individual has an enlarged spleen (e.g., Felty syndrome, malaria and sarcoidosis), and some drug treatment regimens.

[0518] The polynucleotides, polypeptides, antibodies, and/or agonists or antagonists of the present invention may be useful in diagnosing, prognosing, preventing, and/or treating lymphocytopenias (decreased numbers of B and/or T lymphocytes), including, but not limited lymphocytopenias resulting from or associated with stress, drug treatments (e.g., drug treatment with corticosteroids, cancer chemotherapies, and/or radiation therapies), AIDS infection and/or other diseases such as, for example, cancer, rheumatoid arthritis, systemic lupus erythematosus, chronic infections, some viral infections and/or hereditary disorders (e.g., DiGeorge syndrome, Wiskott-Aldrich Syndrome, severe combined immunodeficiency, ataxia telangiectsia).

[0519] The polynucleotides, polypeptides, antibodies, and/or agonists or antagonists of the present invention may be useful in diagnosing, prognosing, preventing, and/or treating diseases and disorders associated with macrophage numbers and/or macrophage function including, but not limited to, Gaucher's disease, Niemann-Pick disease, Letterer-Siwe disease and Hand-Schuller-Christian disease.

[0520] In another embodiment, the polynucleotides, polypeptides, antibodies, and/or agonists or antagonists of the present invention may be useful in diagnosing, prognosing, preventing, and/or treating diseases and disorders associated with eosinophil numbers and/or eosinophil function including, but not limited to, idiopathic hypereosinophilic syndrome, eosinophilia-myalgia syndrome, and Hand-Schuller-Christian disease.

[0521] In yet another embodiment, the polynucleotides, polypeptides, antibodies, and/or agonists or antagonists of the present invention may be useful in diagnosing, prognosing, preventing, and/or treating leukemias and lymphomas including, but not limited to, acute lymphocytic (lymphpblastic) leukemia (ALL), acute myeloid (myelocytic, myelogenous, myeloblastic, or myelomonocytic) leukemia, chronic lymphocytic leukemia (e.g., B cell leukemias, T cell leukemias, Sezary syndrome, and Hairy cell leukemia), chronic myelocytic (myeloid, myelogenous, or granulocytic) leukemia, Hodgkin's lymphoma, non-hodgkin's lymphoma, Burkitt's lymphoma, and mycosis fungoides.

[0522] In other embodiments, the polynucleotides, polypeptides, antibodies, and/or agonists or antagonists of the present invention may be useful in diagnosing, prognosing, preventing, and/or treating diseases and disorders of plasma cells including, but not limited to, plasma cell dyscrasias, monoclonal gammaopathies, monoclonal gammopathies of undetermined significance, multiple myeloma, macroglobulinemia, Waldenstrom's macroglobulinemia, cryoglobulinemia, and Raynaud's phenomenon.

[0523] In other embodiments, the polynucleotides, polypeptides, antibodies, and/or agonists or antagonists of the present invention may be useful in treating, preventing, and/or diagnosing myeloproliferative disorders, including but not limited to, polycythemia vera, relative polycythemia, secondary polycythemia, myelofibrosis, acute myelofibrosis, agnogenic myelod metaplasia, thrombocythemia, (including both primary and seconday thrombocythemia) and chronic myelocytic leukemia.

[0524] In other embodiments, the polynucleotides, polypeptides, antibodies, and/or agonists or antagonists of the present invention may be useful as a treatment prior to surgery, to increase blood cell production.

[0525] In other embodiments, the polynucleotides, polypeptides, antibodies, and/or agonists or antagonists of the present invention may be useful as an agent to enhance the migration, phagocytosis, superoxide production, antibody dependent cellular cytotoxicity of neutrophils, eosionophils and macrophages.

[0526] In other embodiments, the polynucleotides, polypeptides, antibodies, and/or agonists or antagonists of the present invention may be useful as an agent to increase the number of stem cells in circulation prior to stem cells pheresis. In another specific embodiment, the polynucleotides, polypeptides, antibodies, and/or agonists or antagonists of the present invention may be useful as an agent to increase the number of stem cells in circulation prior to platelet pheresis.

[0527] In other embodiments, the polynucleotides, polypeptides, antibodies, and/or agonists or antagonists of the present invention may be useful as an agent to increase cytokine production.

[0528] In other embodiments, the polynucleotides, polypeptides, antibodies, and/or agonists or antagonists of the present invention may be useful in preventing, diagnosing, and/or treating primary hematopoietic disorders.

[0529] Hyperproliferative Disorders

[0530] Pancreatic associated polynucleotides or polypeptides, or agonists or antagonists thereof, can be used to treat, prevent, diagnose and/or prognose hyperproliferative diseases, disorders, and/or conditions, including neoplasms.

[0531] In a specific embodiment, pancreatic associated polynucleotides or polypeptides, or agonists or antagonists thereof, can be used to treat, prevent, and/or diagnose hyperproliferative diseases, disorders, and/or conditions of the pancreas.

[0532] In a preferred embodiment, pancreatic associated polynucleotides or polypeptides, or agonists or antagonists thereof, can be used to treat, prevent, and/or diagnose pancreatic neoplasms.

[0533] Pancreatic associated polynucleotides or polypeptides, or agonists or antagonists of the invention, may inhibit the proliferation of the disorder through direct or indirect interactions. Alternatively, pancreatic associated polynucleotides or polypeptides, or agonists or antagonists thereof, may proliferate other cells, which can inhibit the hyperproliferative disorder.

[0534] For example, by increasing an immune response, particularly increasing antigenic qualities of the hyperproliferative disorder or by proliferating, differentiating, or mobilizing T-cells, hyperproliferative diseases, disorders, and/or conditions can be treated, prevented, and/or diagnosed. This immune response may be increased by either enhancing an existing immune response, or by initiating a new immune response. Alternatively, decreasing an immune response may also be a method of treating, preventing, and/or diagnosing hyperproliferative diseases, disorders, and/or conditions, such as a chemotherapeutic agent.

[0535] Examples of hyperproliferative diseases, disorders, and/or conditions that can be treated, prevented, and/or diagnosed by pancreatic associated polynucleotides or polypeptides, or agonists or antagonists thereof, include, but are not limited to neoplasms located in the: prostate, colon, abdomen, bone, breast, digestive system, liver, pancreas, peritoneum, endocrine glands (adrenal, parathyroid, pituitary, testicles, ovary, thymus, thyroid), eye, head and neck, nervous (central and peripheral), lymphatic system, pelvic, skin, soft tissue, spleen, thoracic, and urogenital.

[0536] Similarly, other hyperproliferative disorders can also be treated or detected by polynucleotides or polypeptides, or agonists or antagonists of the present invention. Examples of such hyperproliferative disorders include, but are not limited to: Acute Childhood Lymphoblastic Leukemia, Acute Lymphoblastic Leukemia, Acute Lymphocytic Leukemia, Acute Myeloid Leukemia, Adrenocortical Carcinoma, Adult (Primary) Hepatocellular Cancer, Adult (Primary) Liver Cancer, Adult Acute Lymphocytic Leukemia, Adult Acute Myeloid Leukemia, Adult Hodgkin's Disease, Adult Hodgkin's Lymphoma, Adult Lymphocytic Leukemia, Adult Non-Hodgkin's Lymphoma, Adult Primary Liver Cancer, Adult Soft Tissue Sarcoma, AIDS-Related Lymphoma, AIDS-Related Malignancies, Anal Cancer, Astrocytoma, Bile Duct Cancer, Bladder Cancer, Bone Cancer, Brain Stem Glioma, Brain Tumors, Breast Cancer, Cancer of the Renal Pelvis and Ureter, Central Nervous System (Primary) Lymphoma, Central Nervous System Lymphoma, Cerebellar Astrocytoma, Cerebral Astrocytoma, Cervical Cancer, Childhood (Primary) Hepatocellular Cancer, Childhood (Primary) Liver Cancer, Childhood Acute Lymphoblastic Leukemia, Childhood Acute Myeloid Leukemia, Childhood Brain Stem Glioma, Childhood Cerebellar Astrocytoma, Childhood Cerebral Astrocytoma, Childhood Extracranial Germ Cell Tumors, Childhood Hodgkin's Disease, Childhood Hodgkin's Lymphoma, Childhood Hypothalamic and Visual Pathway Glioma, Childhood Lymphoblastic Leukemia, Childhood Medulloblastoma, Childhood Non-Hodgkin's Lymphoma, Childhood Pineal and Supratentorial Primitive Neuroectodermal Tumors, Childhood Primary Liver Cancer, Childhood Rhabdomyosarcoma, Childhood Soft Tissue Sarcoma, Childhood Visual Pathway and Hypothalamic Glioma, Chronic Lymphocytic Leukemia, Chronic Myelogenous Leukemia, Colon Cancer, Cutaneous T-Cell Lymphoma, Endocrine Pancreas Islet Cell Carcinoma, Endometrial Cancer, Ependymoma, Epithelial Cancer, Esophageal Cancer, Ewing's Sarcoma and Related Tumors, Exocrine Pancreatic Cancer, Extracranial Germ Cell Tumor, Extragonadal Germ Cell Tumor, Extrahepatic Bile Duct Cancer, Eye Cancer, Female Breast Cancer, Gaucher's Disease, Gallbladder Cancer, Gastric Cancer, Gastrointestinal Carcinoid Tumor, Gastrointestinal Tumors, Germ Cell Tumors, Gestational Trophoblastic Tumor, Hairy Cell Leukemia, Head and Neck Cancer, Hepatocellular Cancer, Hodgkin's Disease, Hodgkin's Lymphoma, Hypergammaglobulinemia, Hypopharyngeal Cancer, Intestinal Cancers, Intraocular Melanoma, Islet Cell Carcinoma, Islet Cell Pancreatic Cancer, Kaposi's Sarcoma, Kidney Cancer, Laryngeal Cancer, Lip and Oral Cavity Cancer, Liver Cancer, Lung Cancer, Lymphoproliferative Disorders, Macroglobulinemia, Male Breast Cancer, Malignant Mesothelioma, Malignant Thymoma, Medulloblastoma, Melanoma, Mesothelioma, Metastatic Occult Primary Squamous Neck Cancer, Metastatic Primary Squamous Neck Cancer, Metastatic Squamous Neck Cancer, Multiple Myeloma, Multiple Myeloma/Plasma Cell Neoplasm, Myelodysplastic Syndrome, Myelogenous Leukemia, Myeloid Leukemia, Myeloproliferative Disorders, Nasal Cavity and Paranasal Sinus Cancer, Nasopharyngeal Cancer, Neuroblastoma, Non-Hodgkin's Lymphoma During Pregnancy, Nonmelanoma Skin Cancer, Non-Small Cell Lung Cancer, Occult Primary Metastatic Squamous Neck Cancer, Oropharyngeal Cancer, Osteo-/Malignant Fibrous Sarcoma, Osteosarcoma/Malignant Fibrous Histiocytoma, Osteosarcoma/Malignant Fibrous Histiocytoma of Bone, Ovarian Epithelial Cancer, Ovarian Germ Cell Tumor, Ovarian Low Malignant Potential Tumor, Pancreatic Cancer, Paraproteinemias, Purpura, Parathyroid Cancer, Penile Cancer, Pheochromocytoma, Pituitary Tumor, Plasma Cell Neoplasm/Multiple Myeloma, Primary Central Nervous System Lymphoma, Primary Liver Cancer, Prostate Cancer, Rectal Cancer, Renal Cell Cancer, Renal Pelvis and Ureter Cancer, Retinoblastoma, Rhabdomyosarcoma, Salivary Gland Cancer, Sarcoidosis Sarcomas, Sezary Syndrome, Skin Cancer, Small Cell Lung Cancer, Small Intestine Cancer, Soft Tissue Sarcoma, Squamous Neck Cancer, Stomach Cancer, Supratentorial Primitive Neuroectodermal and Pineal Tumors, T-Cell Lymphoma, Testicular Cancer, Thymoma, Thyroid Cancer, Transitional Cell Cancer of the Renal Pelvis and Ureter, Transitional Renal Pelvis and Ureter Cancer, Trophoblastic Tumors, Ureter and Renal Pelvis Cell Cancer, Urethral Cancer, Uterine Cancer, Uterine Sarcoma, Vaginal Cancer, Visual Pathway and Hypothalamic Glioma, Vulvar Cancer, Waldenstrom's Macroglobulinemia, Wilms' Tumor, and any other hyperproliferative disease, besides neoplasia, located in an organ system listed above.

[0537] In another preferred embodiment, polynucleotides or polypeptides, or agonists or antagonists of the present invention are used to diagnose, prognose, prevent, and/or treat premalignant conditions and to prevent progression to a neoplastic or malignant state, including but not limited to those disorders described above. Such uses are indicated in conditions known or suspected of preceding progression to neoplasia or cancer, in particular, where non-neoplastic cell growth consisting of hyperplasia, metaplasia, or most particularly, dysplasia has occurred (for review of such abnormal growth conditions, see Robbins and Angell, 1976, Basic Pathology, 2d Ed., W. B. Saunders Co., Philadelphia, pp. 68-79.)

[0538] Hyperplasia is a form of controlled cell proliferation, involving an increase in cell number in a tissue or organ, without significant alteration in structure or function. Hyperplastic disorders which can be diagnosed, prognosed, prevented, and/or treated with compositions of the invention (including polynucleotides, polypeptides, agonists or antagonists) include, but are not limited to, angiofollicular mediastinal lymph node hyperplasia, angiolymphoid hyperplasia with eosinophilia, atypical melanocytic hyperplasia, basal cell hyperplasia, benign giant lymph node hyperplasia, cementum hyperplasia, congenital adrenal hyperplasia, congenital sebaceous hyperplasia, cystic hyperplasia, cystic hyperplasia of the breast, denture hyperplasia, ductal hyperplasia, endometrial hyperplasia, fibromuscular hyperplasia, focal epithelial hyperplasia, gingival hyperplasia, inflammatory fibrous hyperplasia, inflammatory papillary hyperplasia, intravascular papillary endothelial hyperplasia, nodular hyperplasia of prostate, nodular regenerative hyperplasia, pseudoepitheliomatous hyperplasia, senile sebaceous hyperplasia, and verrucous hyperplasia.

[0539] Metaplasia is a form of controlled cell growth in which one type of adult or fully differentiated cell substitutes for another type of adult cell. Metaplastic disorders which can be diagnosed, prognosed, prevented, and/or treated with compositions of the invention (including polynucleotides, polypeptides, agonists or antagonists) include, but are not limited to, agnogenic myeloid metaplasia, apocrine metaplasia, atypical metaplasia, autoparenchymatous metaplasia, connective tissue metaplasia, epithelial metaplasia, intestinal metaplasia, metaplastic anemia, metaplastic ossification, metaplastic polyps, myeloid metaplasia, primary myeloid metaplasia, secondary myeloid metaplasia, squamous metaplasia, squamous metaplasia of amnion, and symptomatic myeloid metaplasia.

[0540] Dysplasia is frequently a forerunner of cancer, and is found mainly in the epithelia; it is the most disorderly form of non-neoplastic cell growth, involving a loss in individual cell uniformity and in the architectural orientation of cells. Dysplastic cells often have abnormally large, deeply stained nuclei, and exhibit pleomorphism. Dysplasia characteristically occurs where there exists chronic irritation or inflammation. Dysplastic disorders which can be diagnosed, prognosed, prevented, and/or treated with compositions of the invention (including polynucleotides, polypeptides, agonists or antagonists) include, but are not limited to, anhidrotic ectodermal dysplasia, anterofacial dysplasia, asphyxiating thoracic dysplasia, atriodigital dysplasia, bronchopulmonary dysplasia, cerebral dysplasia, cervical dysplasia, chondroectodermal dysplasia, cleidocranial dysplasia, congenital ectodermal dysplasia, craniodiaphysial dysplasia, craniocarpotarsal dysplasia, craniometaphysial dysplasia, dentin dysplasia, diaphysial dysplasia, ectodermal dysplasia, enamel dysplasia, encephalo-ophthalmic dysplasia, dysplasia epiphysialis hemimelia, dysplasia epiphysialis multiplex, dysplasia epiphysialis punctata, epithelial dysplasia, faciodigitogenital dysplasia, familial fibrous dysplasia of jaws, familial white folded dysplasia, fibromuscular dysplasia, fibrous dysplasia of bone, florid osseous dysplasia, hereditary renal-retinal dysplasia, hidrotic ectodermal dysplasia, hypohidrotic ectodermal dysplasia, lymphopenic thymic dysplasia, mammary dysplasia, mandibulofacial dysplasia, metaphysial dysplasia, Mondini dysplasia, monostotic fibrous dysplasia, mucoepithelial dysplasia, multiple epiphysial dysplasia, oculoauriculovertebral dysplasia, oculodentodigital dysplasia, oculovertebral dysplasia, odontogenic dysplasia, ophthalmomandibulomelic dysplasia, periapical cemental dysplasia, polyostotic fibrous dysplasia, pseudoachondroplastic spondyloepiphysial dysplasia, retinal dysplasia, septo-optic dysplasia, spondyloepiphysial dysplasia, and ventriculoradial dysplasia.

[0541] Additional pre-neoplastic disorders which can be diagnosed, prognosed, prevented, and/or treated with compositions of the invention (including polynucleotides, polypeptides, agonists or antagonists) include, but are not limited to, benign dysproliferative disorders (e.g., benign tumors, fibrocystic conditions, tissue hypertrophy, intestinal polyps, colon polyps, and esophageal dysplasia), leukoplakia, keratoses, Bowen's disease, Farmer's Skin, solar cheilitis, and solar keratosis.

[0542] In another embodiment, polynucleotides, polypeptides, antibodies, and/or agonists or antagonists of the present invention conjugated to a toxin or a radioactive isotope, as described herein, may be used to treat cancers and neoplasms, including, but not limited to those described herein. In a further preferred embodiment, polynucleotides, polypeptides, antibodies, and/or agonists or antagonists of the present invention conjugated to a toxin or a radioactive isotope, as described herein, may be used to treat acute myelogenous leukemia.

[0543] Additionally, polynucleotides, polypeptides, and/or agonists or antagonists of the invention may affect apoptosis, and therefore, would be useful in treating a number of diseases associated with increased cell survival or the inhibition of apoptosis. For example, diseases associated with increased cell survival or the inhibition of apoptosis that could be diagnosed, prognosed, prevented, and/or treated by polynucleotides, polypeptides, and/or agonists or antagonists of the invention, include cancers (such as follicular lymphomas, carcinomas with p53 mutations, and hormone-dependent tumors, including, but not limited to colon cancer, cardiac tumors, pancreatic cancer, melanoma, retinoblastoma, glioblastoma, lung cancer, intestinal cancer, testicular cancer, stomach cancer, neuroblastoma, myxoma, myoma, lymphoma, endothelioma, osteoblastoma, osteoclastoma, osteosarcoma, chondrosarcoma, adenoma, breast cancer, prostate cancer, Kaposi's sarcoma and ovarian cancer); autoimmune disorders such as, multiple sclerosis, Sjogren's syndrome, Hashimoto's thyroiditis, biliary cirrhosis, Behcet's disease, Crohn's disease, polymyositis, systemic lupus erythematosus and immune-related glomerulonephritis and rheumatoid arthritis) and viral infections (such as herpes viruses, pox viruses and adenoviruses), inflammation, graft v. host disease, acute graft rejection, and chronic graft rejection.

[0544] In preferred embodiments, polynucleotides, polypeptides, and/or agonists or antagonists of the invention are used to inhibit growth, progression, and/or metastasis of cancers, in particular those listed above.

[0545] Additional diseases or conditions associated with increased cell survival that could be diagnosed, prognosed, prevented, and/or treated by polynucleotides, polypeptides, and/or agonists or antagonists of the invention, include, but are not limited to, progression, and/or metastases of malignancies and related disorders such as leukemia (including acute leukemias (e.g., acute lymphocytic leukemia, acute myelocytic leukemia (including myeloblastic, promyelocytic, myelomonocytic, monocytic, and erythroleukemia)) and chronic leukemias (e.g., chronic myelocytic (granulocytic) leukemia and chronic lymphocytic leukemia)), polycythemia vera, lymphomas (e.g., Hodgkin's disease and non-Hodgkin's disease), multiple myeloma, Waldenstrom's macroglobulinemia, heavy chain disease, and solid tumors including, but not limited to, sarcomas and carcinomas such as fibrosarcoma, myxosarcoma, liposarcoma, chondrosarcoma, osteogenic sarcoma, chordoma, angiosarcoma, endotheliosarcoma, lymphangiosarcoma, lymphangioendotheliosarcoma, synovioma, mesothelioma, Ewing's tumor, leiomyosarcoma, rhabdomyosarcoma, colon carcinoma, pancreatic cancer, breast cancer, ovarian cancer, prostate cancer, squamous cell carcinoma, basal cell carcinoma, adenocarcinoma, sweat gland carcinoma, sebaceous gland carcinoma, papillary carcinoma, papillary adenocarcinomas, cystadenocarcinoma, medullary carcinoma, bronchogenic carcinoma, renal cell carcinoma, hepatoma, bile duct carcinoma, choriocarcinoma, seminoma, embryonal carcinoma, Wilm's tumor, cervical cancer, testicular tumor, lung carcinoma, small cell lung carcinoma, bladder carcinoma, epithelial carcinoma, glioma, astrocytoma, medulloblastoma, craniopharyngioma, ependymoma, pinealoma, emangioblastoma, acoustic neuroma, oligodendroglioma, menangioma, melanoma, neuroblastoma, and retinoblastoma.

[0546] Diseases associated with increased apoptosis that could be diagnosed, prognosed, prevented, and/or treated by polynucleotides, polypeptides, and/or agonists or antagonists of the invention, include AIDS; neurodegenerative disorders (such as Alzheimer's disease, Parkinson's disease, amyotrophic lateral sclerosis, retinitis pigmentosa, cerebellar degeneration and brain tumor or prior associated disease); autoimmune disorders (such as, multiple sclerosis, Sjogren's syndrome, Hashimoto's thyroiditis, biliary cirrhosis, Behcet's disease, Crohn's disease, polymyositis, systemic lupus erythematosus and immune-related glomerulonephritis and rheumatoid arthritis) myelodysplastic syndromes (such as aplastic anemia), graft v. host disease, ischemic injury (such as that caused by myocardial infarction, stroke and reperfusion injury), liver injury (e.g., hepatitis related liver injury, ischemia/reperfusion injury, cholestosis (bile duct injury) and liver cancer); toxin-induced liver disease (such as that caused by alcohol), septic shock, cachexia and anorexia.

[0547] Hyperproliferative diseases and/or disorders that could be diagnosed, prognosed, prevented, and/or treated by polynucleotides, polypeptides, and/or agonists or antagonists of the invention, include, but are not limited to, neoplasms located in the liver, abdomen, bone, breast, digestive system, pancreas, peritoneum, endocrine glands (adrenal, parathyroid, pituitary, testicles, ovary, thymus, thyroid), eye, head and neck, nervous system (central and peripheral), lymphatic system, pelvis, skin, soft tissue, spleen, thorax, and urogenital tract.

[0548] Similarly, other hyperproliferative disorders can also be diagnosed, prognosed, prevented, and/or treated by polynucleotides, polypeptides, and/or agonists or antagonists of the invention. Examples of such hyperproliferative disorders include, but are not limited to: hypergammaglobulinemia, lymphoproliferative disorders, paraproteinemias, purpura, sarcoidosis, Sezary Syndrome, Waldenstron's macroglobulinemia, Gaucher's Disease, histiocytosis, and any other hyperproliferative disease, besides neoplasia, located in an organ system listed above.

[0549] One preferred embodiment utilizes polynucleotides of the present invention to inhibit aberrant cellular division, by gene therapy using the present invention, and/or protein fusions or fragments thereof.

[0550] Thus, the present invention provides a method for treating cell proliferative diseases, disorders, and/or conditions by inserting into an abnormally proliferating cell a polynucleotide of the present invention, wherein said polynucleotide represses said cell proliferation, disease, disorder, and/or condition.

[0551] In a preferred embodiment, the present invention provides a method for treating cell proliferative diseases, disorders and/or conditions of the pancreas by inserting into a cell, a polynucleotide of the present invention, wherein said polynucleotide represses said cell proliferation, disease and/or disorder.

[0552] Another embodiment of the present invention provides a method of treating cell-proliferative diseases, disorders, and/or conditions in individuals comprising administration of one or more active gene copies of the present invention to an abnormally proliferating cell or cells. In a preferred embodiment, polynucleotides of the present invention is a DNA construct comprising a recombinant expression vector effective in expressing a DNA sequence encoding said polynucleotides. In another preferred embodiment of the present invention, the DNA construct encoding the polynucleotides of the present invention is inserted into cells to be treated utilizing a retrovirus, or more preferably an adenoviral vector (see, e.g., G. J. Nabel, et. al., PNAS 96: 324-326 (1999), which is hereby incorporated by reference). In a most preferred embodiment, the viral vector is defective and will not transform non-proliferating cells, only proliferating cells. Moreover, in a preferred embodiment, the polynucleotides of the present invention inserted into proliferating cells either alone, or in combination with or fused to other polynucleotides, can then be modulated via an external stimulus (i.e., magnetic, specific small molecule, chemical, or drug administration, etc.), which acts upon the promoter upstream of said polynucleotides to induce expression of the encoded protein product. As such the beneficial therapeutic affect of the present invention may be expressly modulated (i.e., to increase, decrease, or inhibit expression of the present invention) based upon said external stimulus.

[0553] Polynucleotides of the present invention may be useful in repressing expression of oncogenic genes or antigens. By “repressing expression of the oncogenic genes” is intended the suppression of the transcription of the gene, the degradation of the gene transcript (pre-message RNA), the inhibition of splicing, the destruction of the messenger RNA, the prevention of the post-translational modifications of the protein, the destruction of the protein, or the inhibition of the normal function of the protein.

[0554] For local administration to abnormally proliferating cells, polynucleotides of the present invention may be administered by any method known to those of skill in the art including, but not limited to transfection, electroporation, microinjection of cells, or in vehicles such as liposomes, lipofectin, or as naked polynucleotides, or any other method described throughout the specification. The polynucleotide of the present invention may be delivered by known gene delivery systems such as, but not limited to, retroviral vectors (Gilboa, J. Virology 44:845 (1982); Hocke, Nature 320:275 (1986); Wilson, et al., Proc. Natl. Acad. Sci. U.S.A. 85:3014), vaccinia virus system (Chakrabarty et al., Mol. Cell Biol. 5:3403 (1985) or other efficient DNA delivery systems (Yates et al., Nature 313:812 (1985)) known to those skilled in the art. These references are exemplary only and are hereby incorporated by reference. In order to specifically deliver or transfect cells which are abnormally proliferating and spare non-dividing cells, it is preferable to utilize a retrovirus, or adenoviral (as described in the art and elsewhere herein) delivery system known to those of skill in the art. Since host DNA replication is required for retroviral DNA to integrate and the retrovirus will be unable to self replicate due to the lack of the retrovirus genes needed for its life cycle. Utilizing such a retroviral delivery system for polynucleotides of the present invention will target said gene and constructs to abnormally proliferating cells and will spare the non-dividing normal cells.

[0555] The polynucleotides of the present invention may be delivered directly to cell proliferative disorder/disease sites in internal organs, body cavities and the like by use of imaging devices used to guide an injecting needle directly to the disease site. The polynucleotides of the present invention may also be administered to disease sites at the time of surgical intervention.

[0556] By “cell proliferative disease” is meant any human or animal disease or disorder, affecting any one or any combination of organs, cavities, or body parts, which is characterized by single or multiple local abnormal proliferations of cells, groups of cells, or tissues, whether benign or malignant.

[0557] Any amount of the polynucleotides of the present invention may be administered as long as it has a biologically inhibiting effect on the proliferation of the treated cells. Moreover, it is possible to administer more than one of the polynucleotide of the present invention simultaneously to the same site. By “biologically inhibiting” is meant partial or total growth inhibition as well as decreases in the rate of proliferation or growth of the cells. The biologically inhibitory dose may be determined by assessing the effects of the polynucleotides of the present invention on target malignant or abnormally proliferating cell growth in tissue culture, tumor growth in animals and cell cultures, or any other method known to one of ordinary skill in the art.

[0558] The present invention is further directed to antibody-based therapies which involve administering of anti-polypeptides and anti-polynucleotide antibodies to a mammalian, preferably human, patient for treating one or more of the described diseases, disorders, and/or conditions. Methods for producing anti-polypeptides and anti-polynucleotide antibodies polyclonal and monoclonal antibodies are described in detail elsewhere herein. Such antibodies may be provided in pharmaceutically acceptable compositions as known in the art or as described herein.

[0559] A summary of the ways in which the antibodies of the present invention may be used therapeutically includes binding polynucleotides or polypeptides of the present invention locally or systemically in the body or by direct cytotoxicity of the antibody, e.g., as mediated by complement (CDC) or by effector cells (ADCC). Some of these approaches are described in more detail below. Armed with the teachings provided herein, one of ordinary skill in the art will know how to use the antibodies of the present invention for diagnostic, monitoring or therapeutic purposes without undue experimentation.

[0560] In particular, the antibodies, fragments and derivatives of the present invention are useful for treating a subject having or developing cell proliferative and/or differentiation diseases, disorders, and/or conditions as described herein. Such treatment comprises administering a single or multiple doses of the antibody, or a fragment, derivative, or a conjugate thereof.

[0561] The antibodies of this invention may be advantageously utilized in combination with other monoclonal or chimeric antibodies, or with lymphokines or hematopoietic growth factors, for example, which serve to increase the number or activity of effector cells which interact with the antibodies.

[0562] It is preferred to use high affinity and/or potent in vivo inhibiting and/or neutralizing antibodies against polypeptides or polynucleotides of the present invention, fragments or regions thereof, for both immunoassays directed to and therapy of diseases, disorders, and/or conditions related to polynucleotides or polypeptides, including fragments thereof, of the present invention. Such antibodies, fragments, or regions, will preferably have an affinity for polynucleotides or polypeptides, including fragments thereof. Preferred binding affinities include those with a dissociation constant or Kd less than 5×10⁻⁶M, 10⁻⁶M, 5×10⁻⁷M, 10⁻⁷M, 5×10⁻⁸M, 10⁻⁸M, 5×10⁻⁹M, 10⁻⁹M, 5×10⁻¹⁰M, 10⁻¹⁰M, 5×10⁻¹¹M, 10⁻¹¹M, 5×10⁻¹²M, 10⁻¹²M, 5×10⁻¹³M, 10⁻¹³M, 5×10⁻¹⁴M, 10⁻¹⁴M, 5×10⁻¹⁵M, and 10⁻¹⁵M,

[0563] Moreover, pancreatic antigen polypeptides of the present invention or fragments thereof, are useful in inhibiting the angiogenesis of proliferative cells or tissues, either alone, as a protein fusion, or in combination with other polypeptides directly or indirectly, as described elsewhere herein. In a most preferred embodiment, said anti-angiogenesis effect may be achieved indirectly, for example, through the inhibition of hematopoietic, tumor-specific cells, such as tumor-associated macrophages (see, e.g., Joseph I B, et al. J Natl Cancer Inst, 90(21):1648-53 (1998), which is hereby incorporated by reference). Antibodies directed to polypeptides or polynucleotides of the present invention may also result in inhibition of angiogenesis directly, or indirectly (see, e.g., Witte L, et al., Cancer Metastasis Rev. 17(2):155-61 (1998), which is hereby incorporated by reference)).

[0564] Polypeptides, including protein fusions, of the present invention, or fragments thereof may be useful in inhibiting proliferative cells or tissues through the induction of apoptosis. Said polypeptides may act either directly, or indirectly to induce apoptosis of proliferative cells and tissues, for example in the activation of a death-domain receptor, such as tumor necrosis factor (TNF) receptor-1, CD95 (Fas/APO-1), TNF-receptor-related apoptosis-mediated protein (TRAMP) and TNF-related apoptosis-inducing ligand (TRAIL) receptor-1 and -2 (see, e.g., Schulze-Osthoff K, et. al., Eur J Biochem 254(3):439-59 (1998), which is hereby incorporated by reference). Moreover, in another preferred embodiment of the present invention, said polypeptides may induce apoptosis through other mechanisms, such as in the activation of other proteins which will activate apoptosis, or through stimulating the expression of said proteins, either alone or in combination with small molecule drugs or adjuvants, such as apoptonin, galectins, thioredoxins, antiinflammatory proteins (See for example, Mutat. Res. 400(1-2):447-55 (1998), Med Hypotheses.50(5):423-33 (1998), Chem. Biol. Interact. April 24;111-112:23-34 (1998), J. Mo. Med. 76(6):402-12 (1998), Int. J. Tissue React. 20(1):3-15 (1998), which are all hereby incorporated by reference).

[0565] Polypeptides, including protein fusions to, or fragments thereof, of the present invention are useful in inhibiting the metastasis of proliferative cells or tissues. Inhibition may occur as a direct result of administering polypeptides, or antibodies directed to said polypeptides as described elsewhere herein, or indirectly, such as activating the expression of proteins known to inhibit metastasis, for example alpha 4 integrins, (See, e.g., Curr Top Microbiol Immunol 1998;231:125-41, which is hereby incorporated by reference). Such therapeutic affects of the present invention may be achieved either alone, or in combination with small molecule drugs or adjuvants.

[0566] In another embodiment, the invention provides a method of delivering compositions containing the polypeptides of the invention (e.g., compositions containing polypeptides or anti-pancreatic antigen polypeptide antibodies associated with heterologous polypeptides, heterologous nucleic acids, toxins, or prodrugs) to targeted cells expressing the polypeptide of the present invention, pancreatic antigen polypeptides or anti-pancreatic antigen polypeptide antibodies of the invention may be associated with heterologous polypeptides, heterologous nucleic acids, toxins, or prodrugs via hydrophobic, hydrophilic, ionic and/or covalent interactions.

[0567] Polypeptides, protein fusions to, or fragments thereof, of the present invention are useful in enhancing the immunogenicity and/or antigenicity of proliferating cells or tissues, either directly, such as would occur if the polypeptides of the present invention ‘vaccinated’ the immune response to respond to proliferative antigens and immunogens, or indirectly, such as in activating the expression of proteins known to enhance the immune response (e.g. chemokines), to said antigens and immunogens.

[0568] Urinary System Disorders

[0569] Polynucleotides, polypeptides, antibodies, and/or agonists or antagonists of the present invention, may be used to treat, prevent, diagnose, and/or prognose disorders of the urinary system, including but not limited to disorders of the renal system, bladder, ureters, and urethra. Renal disorders include, but are not limited to, kidney failure, nephritis, blood vessel disorders of kidney, metabolic and congenital kidney disorders, urinary disorders of the kidney, autoimmune disorders, sclerosis and necrosis, electrolyte imbalance, and kidney cancers.

[0570] Kidney failure diseases include, but are not limited to, acute kidney failure, chronic kidney failure, atheroembolic renal failure, and end-stage renal disease. Inflammatory diseases of the kidney include acute glomerulonephritis, postinfectious glomerulonephritis, rapidly progressive glomerulonephritis, nephrotic syndrome, membranous glomerulonephritis, familial nephrotic syndrome, membranoproliferative glomerulonephritis I and II, mesangial proliferative glomerulonephritis, chronic glomerulonephritis, acute tubulointerstitial nephritis, chronic tubulointerstitial nephritis, acute post-streptococcal glomerulonephritis (PSGN), pyelonephritis, lupus nephritis, chronic nephritis, interstitial nephritis, and post-streptococcal glomerulonephritis.

[0571] Blood vessel disorders of the kidneys include, but are not limited to, kidney infarction, atheroembolic kidney disease, cortical necrosis, malignant nephrosclerosis, renal vein thrombosis, renal underperfusion, renal ischemia-reperfusion, renal artery embolism, and renal artery stenosis. Kidney disorders resulting form urinary tract problems include, but are not limited to, pyelonephritis, hydronephrosis, urolithiasis (renal lithiasis, nephrolithiasis), reflux nephropathy, urinary tract infections, urinary retention, and acute or chronic unilateral obstructive uropathy.

[0572] Metabolic and congenital disorders of the kidneys include, but are not limited to, renal tubular acidosis, renal glycosuria, nephrogenic diabetes insipidus, cystinuria, Fanconi's syndrome, vitamin D-resistant rickets, Hartnup disease, Bartter's syndrome, Liddle's syndrome, polycystic kidney disease, medullary cystic disease, medullary sponge kidney, Alport's syndrome, nail-patella syndrome, congenital nephrotic syndrome, CRUSH syndrome, horseshoe kidney, diabetic nephropathy, nephrogenic diabetes insipidus, analgesic nephropathy, kidney stones, and membranous nephropathy, Kidney disorders resulting from an autoimmune response include, but are not limited to, systemic lupus erythematosus (SLE), Goodpasture syndrome, IgA nephropathy, and IgM mesangial proliferative glomerulonephritis.

[0573] Sclerotic or necrotic disorders of the kidney include, but are not limited to, glomerulosclerosis, diabetic nephropathy, focal segmental glomerulosclerosis (FSGS), necrotizing glomerulonephritis, and renal papillary necrosis. Kidneys may also develop carcinomas, including, but not limited to, hypernephroma, nephroblastoma, renal cell cancer, transitional cell cancer, squamous cell cancer, and Wilm's tumor.

[0574] Kidney disorders may also result in electrolyte imbalances, including, but not limited to, nephrocalcinosis, pyuria, edema, hydronephritis, proteinuria, hyponatremia, hypernatremia, hypokalemia, hyperkalemia, hypocalcemia, hypercalcemia, hypophosphatemia, and hyperphosphatemia.

[0575] Bladder disorders include, but are not limited to, benign prostatic hyperplasia (BPH), interstitial cystitis (IC), prostatitis, proteinuria, urinary tract infections, urinary incontinence, urinary retention. Disorders of the ureters and urethra include, but are not limited to, acute or chronic unilateral obstructive uropathy. The bladder, ureters, and urethra may also develop carcinomas, including, but not limited to, superficial bladder cancer, invasive bladder cancer, carcinoma of the ureter, and urethra cancers.

[0576] Polypeptides may be administered using any method known in the art, including, but not limited to, direct needle injection at the delivery site, intravenous injection, topical administration, catheter infusion, biolistic injectors, particle accelerators, gelfoam sponge depots, other commercially available depot materials, osmotic pumps, oral or suppositorial solid pharmaceutical formulations, decanting or topical applications during surgery, aerosol delivery. Such methods are known in the art. Polypeptides may be administered as part of a Therapeutic, described in more detail below. Methods of delivering polynucleotides are described in more detail herein.

[0577] Cardiovascular Disorders

[0578] Polynucleotides or polypeptides, or agonists or antagonists of the present invention, may be used to treat, prevent, diagnose, and/or prognose cardiovascular disorders, including, but not limited to, peripheral artery disease, such as limb ischemia.

[0579] Cardiovascular disorders include cardiovascular abnormalities, such as arterio-arterial fistula, arteriovenous fistula, cerebral arteriovenous malformations, congenital heart defects, pulmonary atresia, and Scimitar Syndrome. Congenital heart defects include aortic coarctation, cor triatriatum, coronary vessel anomalies, crisscross heart, dextrocardia, patent ductus arteriosus, Ebstein's anomaly, Eisenmenger complex, hypoplastic left heart syndrome, levocardia, tetralogy of fallot, transposition of great vessels, double outlet right ventricle, tricuspid atresia, persistent truncus arteriosus, total anomalous pulmonary venous connection, hypoplastic left heart syndrome, and heart septal defects, such as aortopulmonary septal defect, endocardial cushion defects, Lutembacher's Syndrome, atrioventricular canal defect, trilogy of Fallot, ventricular heart septal defects.

[0580] Cardiovascular disorders also include heart disease, such as arrhythmias, carcinoid heart disease, high cardiac output, low cardiac output, cardiac tamponade, endocarditis (including bacterial), heart aneurysm, cardiac arrest, sudden cardiac death, congestive heart failure, congestive cardiomyopathy, paroxysmal dyspnea, cardiac edema, heart hypertrophy, congestive cardiomyopathy, left ventricular hypertrophy, right ventricular hypertrophy, post-infarction heart rupture, ventricular septal rupture, heart valve diseases, myocardial diseases, myocardial ischemia, pericardial effusion, pericarditis (including constrictive and tuberculous), pneumopericardium, postpericardiotomy syndrome, pulmonary heart disease, rheumatic heart disease, ventricular dysfunction, hyperemia, cardiovascular pregnancy complications, Scimitar Syndrome, diastolic dysfunction, enlarged heart, heart block, J-curve phenomenon, rheumatic heart disease, Marfan syndrome, cardiovascular syphilis, and cardiovascular tuberculosis.

[0581] Arrhythmias include sinus arrhythmia, atrial fibrillation, atrial flutter, bradycardia, extrasystole, Adams-Stokes Syndrome, bundle-branch block, sinoatrial block, long QT syndrome, parasystole, Lown-Ganong-Levine Syndrome, Mahaim-type pre-excitation syndrome, Wolff-Parkinson-White syndrome, sick sinus syndrome, tachycardias, and ventricular fibrillation. Tachycardias include paroxysmal tachycardia, supraventricular tachycardia, accelerated idioventricular rhythm, atrioventricular nodal reentry tachycardia, ectopic atrial tachycardia, ectopic junctional tachycardia, sinoatrial nodal reentry tachycardia, sinus tachycardia, Torsades de Pointes, and ventricular tachycardia.

[0582] Heart valve disease include aortic valve insufficiency, aortic valve stenosis, heart murmurs, aortic valve prolapse, mitral valve prolapse, tricuspid valve prolapse, mitral valve insufficiency, mitral valve stenosis, pulmonary atresia, pulmonary valve insufficiency, pulmonary valve stenosis, tricuspid atresia, tricuspid valve insufficiency, tricuspid valve stenosis, and bicuspid aortic valve.

[0583] Myocardial diseases include alcoholic cardiomyopathy, congestive cardiomyopathy, hypertrophic cardiomyopathy, aortic subvalvular stenosis, pulmonary subvalvular stenosis, restrictive cardiomyopathy, Chagas cardiomyopathy, endocardial fibroelastosis, endomyocardial fibrosis, Kearns Syndrome, Barth syndrome, myocardial reperfusion injury, and myocarditis.

[0584] Myocardial ischemias include coronary disease, such as angina pectoris, Prinzmetal's angina, unstable angina, coronary aneurysm, coronary arteriosclerosis, coronary thrombosis, coronary vasospasm, myocardial infarction and myocardial stunning.

[0585] Cardiovascular diseases also include vascular diseases such as aneurysms, angiodysplasia, angiomatosis, bacillary angiomatosis, Hippel-Lindau Disease, Klippel-Trenaunay-Weber Syndrome, Sturge-Weber Syndrome, angioneurotic edema, aortic diseases, Takayasu's Arteritis, aortitis, Leriche's Syndrome, arterial occlusive diseases, arteritis, enarteritis, polyarteritis nodosa, cerebrovascular disorders, diabetic angiopathies, diabetic retinopathy, embolisms, thrombosis, erythromelalgia, hemorrhoids, hepatic veno-occlusive disease, hypertension, hypotension (shock), ischemia, peripheral vascular diseases, phlebitis, superficial phlebitis, pulmonary veno-occlusive disease, chronic obstructive pulmonary disease, Buerger's disease, Raynaud's disease, CREST syndrome, retinal vein occlusion, Scimitar syndrome, superior vena cava syndrome, telangiectasia, atacia telangiectasia, hereditary hemorrhagic telangiectasia, deep vein thrombosis, varicocele, varicose veins, varicose ulcer, vasculitis, and venous insufficiency.

[0586] Aneurysms include dissecting aneurysms, false aneurysms, infected aneurysms, ruptured aneurysms, aortic aneurysms, cerebral aneurysms, coronary aneurysms, heart aneurysms, and iliac aneurysms.

[0587] Arterial occlusive diseases include arteriosclerosis, arteriolosclerosis, atherosclerosis, intermittent claudication, carotid stenosis, fibromuscular dysplasias, mesenteric vascular occlusion, Moyamoya disease, renal artery obstruction, retinal artery occlusion, and thromboangiitis obliterans.

[0588] Cerebrovascular disorders include carotid artery diseases, cerebral amyloid angiopathy, cerebral aneurysm, cerebral anoxia, cerebral arteriosclerosis, cerebral arteriovenous malformation, cerebral artery diseases, cerebral embolism and thrombosis, carotid artery thrombosis, sinus thrombosis, Wallenberg's syndrome, cerebral hemorrhage, epidural hematoma, subdural hematoma, subaraxhnoid hemorrhage, cerebral infarction, cerebral ischemia (including transient), subclavian steal syndrome, periventricular leukomalacia, vascular headache, cluster headache, migraine, and vertebrobasilar insufficiency.

[0589] Embolisms include air embolisms, amniotic fluid embolisms, cholesterol embolisms, blue toe syndrome, fat embolisms, pulmonary embolisms, and thromoboembolisms. Thrombosis include coronary thrombosis, hepatic vein thrombosis, deep vein thrombosis, retinal vein occlusion, carotid artery thrombosis, sinus thrombosis, Wallenberg's syndrome, and thrombophlebitis.

[0590] Ischemia includes cerebral ischemia, ischemic colitis, silent ischemia, compartment syndromes, anterior compartment syndrome, myocardial ischemia, reperfusion injuries, and peripheral limb ischemia. Vasculitis includes aortitis, arteritis, Behcet's Syndrome, Churg-Strauss Syndrome, mucocutaneous lymph node syndrome, thromboangiitis obliterans, hypersensitivity vasculitis, Schoenlein-Henoch purpura, allergic cutaneous vasculitis, and Wegener's granulomatosis.

[0591] Cardiovascular diseases can also occur due to electrolyte imbalances that include, but are not limited to hyponatremia, hypernatremia, hypokalemia, hyperkalemia, hypocalcemia, hypercalcemia, hypophosphatemia, and hyperphophatemia. Neoplasm and/or cancers of the cardiovascular system include, but are not limited to, myxomas, fibromas, and rhabdomyomas.

[0592] Polypeptides may be administered using any method known in the art, including, but not limited to, direct needle injection at the delivery site, intravenous injection, topical administration, catheter infusion, biolistic injectors, particle accelerators, gelfoam sponge depots, other commercially available depot materials, osmotic pumps, oral or suppositorial solid pharmaceutical formulations, decanting or topical applications during surgery, aerosol delivery. Such methods are known in the art. Polypeptides may be administered as part of a Therapeutic, described in more detail below. Methods of delivering polynucleotides are described in more detail herein.

[0593] Respiratory Disorders

[0594] Polynucleotides or polypeptides, or agonists or antagonists of the present invention may be used to treat, prevent, diagnose, and/or prognose diseases and/or disorders of the respiratory system.

[0595] Diseases and disorders of the respiratory system include, but are not limited to, nasal vestibulitis, nonallergic rhinitis (e.g., acute rhinitis, chronic rhinitis, atrophic rhinitis, vasomotor rhinitis), nasal polyps, and sinusitis, juvenile angiofibromas, cancer of the nose and juvenile papillomas, vocal cord polyps, nodules (singer's nodules), contact ulcers, vocal cord paralysis, laryngoceles, pharyngitis (e.g., viral and bacterial), tonsillitis, tonsillar cellulitis, parapharyngeal abscess, laryngitis, laryngoceles, and throat cancers (e.g., cancer of the nasopharynx, tonsil cancer, larynx cancer), lung cancer (e.g., squamous cell carcinoma, small cell (oat cell) carcinoma, large cell carcinoma, and adenocarcinoma), allergic disorders (eosinophilic pneumonia, hypersensitivity pneumonitis (e.g., extrinsic allergic alveolitis, allergic interstitial pneumonitis, organic dust pneumoconiosis, allergic bronchopulmonary aspergillosis, asthma, Wegener's granulomatosis (granulomatous vasculitis), Goodpasture's syndrome)), pneumonia (e.g., bacterial pneumonia (e.g., Streptococcus pneumoniae (pneumoncoccal pneumonia), Staphylococcus aureus (staphylococcal pneumonia), Gram-negative bacterial pneumonia (caused by, e.g., Klebsiella and Pseudomonas spp.), Mycoplasma pneumoniae pneumonia, Hemophilus influenzae pneumonia, Legionella pneumophila (Legionnaires' disease), and Chlamydia psittaci (Psittacosis)), and viral pneumonia (e.g., influenza, chickenpox (varicella).

[0596] Additional diseases and disorders of the respiratory system include, but are not limited to bronchiolitis, polio (poliomyelitis), croup, respiratory syncytial viral infection, mumps, erythema infectiosum (fifth disease), roseola infantum, progressive rubella panencephalitis, german measles, and subacute sclerosing panencephalitis), fungal pneumonia (e.g., Histoplasmosis, Coccidioidomycosis, Blastomycosis, fungal infections in people with severely suppressed immune systems (e.g., cryptococcosis, caused by Cryptococcus neoformans; aspergillosis, caused by Aspergillus spp.; candidiasis, caused by Candida; and mucormycosis)), Pneumocystis carinii (pneumocystis pneumonia), atypical pneumonias (e.g., Mycoplasma and Chlamydia spp.), opportunistic infection pneumonia, nosocornial pneumonia, chemical pneumonitis, and aspiration pneumonia, pleural disorders (e.g., pleurisy, pleural effusion, and pneumothorax (e.g., simple spontaneous pneumothorax, complicated spontaneous pneumothorax, tension pneumothorax)), obstructive airway diseases (e.g., asthma, chronic obstructive pulmonary disease (COPD), emphysema, chronic or acute bronchitis), occupational lung diseases (e.g., silicosis, black lung (coal workers' pneumoconiosis), asbestosis, berylliosis, occupational asthma, byssinosis, and benign pneumoconioses), Infiltrative Lung Disease (e.g., pulmonary fibrosis (e.g., fibrosing alveolitis, usual interstitial pneumonia), idiopathic pulmonary fibrosis, desquamative interstitial pneumonia, lymphoid interstitial pneumonia, histiocytosis X (e.g., Letterer-Siwe disease, Hand-Schüiller-Christian disease, eosinophilic granuloma), idiopathic pulmonary hemosiderosis, sarcoidosis and pulmonary alveolar proteinosis), Acute respiratory distress syndrome (also called, e.g., adult respiratory distress syndrome), edema, pulmonary embolism, bronchitis (e.g., viral, bacterial), bronchiectasis, atelectasis, lung abscess (caused by, e.g., Staphylococcus aureus or Legionella pneumophila), and cystic fibrosis.

[0597] Anti-Angiogenesis Activity

[0598] The naturally occurring balance between endogenous stimulators and inhibitors of angiogenesis is one in which inhibitory influences predominate. Rastinejad et al., Cell 56:345-355 (1989). In those rare instances in which neovascularization occurs under normal physiological conditions, such as wound healing, organ regeneration, embryonic development, and female reproductive processes, angiogenesis is stringently regulated and spatially and temporally delimited. Under conditions of pathological angiogenesis such as that characterizing solid tumor growth, these regulatory controls fail. Unregulated angiogenesis becomes pathologic and sustains progression of many neoplastic and non-neoplastic diseases. A number of serious diseases are dominated by abnormal neovascularization including solid tumor growth and metastases, arthritis, some types of eye disorders, and psoriasis. See, e.g., reviews by Moses et al., Biotech. 9:630-634 (1991); Folkman et al., N. Engl. J. Med., 333:1757-1763 (1995); Auerbach et al., J. Microvasc. Res. 29:401-411 (1985); Folkman, Advances in Cancer Research, eds. Klein and Weinhouse, Academic Press, New York, pp. 175-203 (1985); Patz, Am. J. Opthalmol. 94:715-743 (1982); and Folkman et al., Science 221:719-725 (1983). In a number of pathological conditions, the process of angiogenesis contributes to the disease state. For example, significant data have accumulated which suggest that the growth of solid tumors is dependent on angiogenesis. Folkman and Klagsbrun, Science 235:442-447 (1987).

[0599] The present invention provides for treatment of diseases or disorders associated with neovascularization by administration of the polynucleotides and/or polypeptides of the invention, as well as agonists or antagonists of the present invention. Malignant and metastatic conditions which can be treated with the polynucleotides and polypeptides, or agonists or antagonists of the invention include, but are not limited to, malignancies, solid tumors, and cancers described herein and otherwise known in the art (for a review of such disorders, see Fishman et al., Medicine, 2d Ed., J. B. Lippincott Co., Philadelphia (1985)). Thus, the present invention provides a method of treating an angiogenesis-related disease and/or disorder, comprising administration to an individual in need thereof a therapeutically effective amount of a polynucleotide, polypeptide, antagonist and/or agonist of the invention. For example, polynucleotides, polypeptides, antagonists and/or agonists may be utilized in a variety of additional methods in order to therapeutically treat a cancer or tumor. Cancers which may be treated with polynucleotides, polypeptides, antagonists and/or agonists include, but are not limited to solid tumors, including prostate, lung, breast, ovarian, stomach, pancreas, larynx, esophagus, testes, liver, parotid, biliary tract, colon, rectum, cervix, uterus, endometrium, kidney, bladder, thyroid cancer; primary tumors and metastases; melanomas; glioblastoma; Kaposi's sarcoma; leiomyosarcoma; non-small cell lung cancer; colorectal cancer; advanced malignancies; and blood born tumors such as leukemias. For example, polynucleotides, polypeptides, antagonists and/or agonists may be delivered topically, in order to treat cancers such as skin cancer, head and neck tumors, breast tumors, and Kaposi's sarcoma.

[0600] Within yet other aspects, polynucleotides, polypeptides, antagonists and/or agonists may be utilized to treat superficial forms of bladder cancer by, for example, intravesical administration. Polynucleotides, polypeptides, antagonists and/or agonists may be delivered directly into the tumor, or near the tumor site, via injection or a catheter. Of course, as the artisan of ordinary skill will appreciate, the appropriate mode of administration will vary according to the cancer to be treated. Other modes of delivery are discussed herein.

[0601] Polynucleotides, polypeptides, antagonists and/or agonists may be useful in treating other disorders, besides cancers, which involve angiogenesis. These disorders include, but are not limited to: benign tumors, for example hemangiomas, acoustic neuromas, neurofibromas, trachomas, and pyogenic granulomas; artheroscleric plaques; ocular angiogenic diseases, for example, diabetic retinopathy, retinopathy of prematurity, macular degeneration, corneal graft rejection, neovascular glaucoma, retrolental fibroplasia, rubeosis, retinoblastoma, uvietis and Pterygia (abnormal blood vessel growth) of the eye; rheumatoid arthritis; psoriasis; delayed wound healing; endometriosis; vasculogenesis; granulations; hypertrophic scars (keloids); nonunion fractures; scleroderma; trachoma; vascular adhesions; myocardial angiogenesis; coronary collaterals; cerebral collaterals; arteriovenous malformations; ischemic limb angiogenesis; Osler-Webber Syndrome; plaque neovascularization; telangiectasia; hemophiliac joints; angiofibroma; fibromuscular dysplasia; wound granulation; Crohn's disease; and atherosclerosis.

[0602] For example, within one aspect of the present invention methods are provided for treating hypertrophic scars and keloids, comprising the step of administering a polynucleotide, polypeptide, antagonist and/or agonist of the invention to a hypertrophic scar or keloid.

[0603] Within one embodiment of the present invention polynucleotides, polypeptides, antagonists and/or agonists of the invention are directly injected into a hypertrophic scar or keloid, in order to prevent the progression of these lesions. This therapy is of particular value in the prophylactic treatment of conditions which are known to result in the development of hypertrophic scars and keloids (e.g., burns), and is preferably initiated after the proliferative phase has had time to progress (approximately 14 days after the initial injury), but before hypertrophic scar or keloid development. As noted above, the present invention also provides methods for treating neovascular diseases of the eye, including for example, corneal neovascularization, neovascular glaucoma, proliferative diabetic retinopathy, retrolental fibroplasia and macular degeneration.

[0604] Moreover, ocular disorders associated with neovascularization which can be treated with the polynucleotides and polypeptides of the present invention (including agonists and/or antagonists) include, but are not limited to: neovascular glaucoma, diabetic retinopathy, retinoblastoma, retrolental fibroplasia, uveitis, retinopathy of prematurity macular degeneration, corneal graft neovascularization, as well as other eye inflammatory diseases, ocular tumors and diseases associated with choroidal or iris neovascularization. See, e.g., reviews by Waltman et al., Am. J. Ophthal. 85:704-710 (1978) and Gartner et al., Surv. Ophthal. 22:291-312 (1978).

[0605] Thus, within one aspect of the present invention methods are provided for treating neovascular diseases of the eye such as corneal neovascularization (including corneal graft neovascularization), comprising the step of administering to a patient a therapeutically effective amount of a compound (as described above) to the cornea, such that the formation of blood vessels is inhibited. Briefly, the cornea is a tissue, which normally lacks blood vessels. In certain pathological conditions however, capillaries may extend into the cornea from the pericorneal vascular plexus of the limbus. When the cornea becomes vascularized, it also becomes clouded, resulting in a decline in the patient's visual acuity. Visual loss may become complete if the cornea completely opacitates. A wide variety of disorders can result in corneal neovascularization, including for example, corneal infections (e.g., trachoma, herpes simplex keratitis, leishmaniasis and onchocerciasis), immunological processes (e.g., graft rejection and Stevens-Johnson's syndrome), alkali burns, trauma, inflammation (of any cause), toxic and nutritional deficiency states, and as a complication of wearing contact lenses.

[0606] Within particularly preferred embodiments of the invention, may be prepared for topical administration in saline (combined with any of the preservatives and antimicrobial agents commonly used in ocular preparations), and administered in eyedrop form. The solution or suspension may be prepared in its pure form and administered several times daily. Alternatively, anti-angiogenic compositions, prepared as described above, may also be administered directly to the cornea. Within preferred embodiments, the anti-angiogenic composition is prepared with a muco-adhesive polymer, which binds to cornea. Within further embodiments, the anti-angiogenic factors or anti-angiogenic compositions may be utilized as an adjunct to conventional steroid therapy. Topical therapy may also be useful prophylactically in corneal lesions which are known to have a high probability of inducing an angiogenic response (such as chemical burns). In these instances the treatment, likely in combination with steroids, may be instituted immediately to help prevent subsequent complications.

[0607] Within other embodiments, the compounds described above may be injected directly into the corneal stroma by an ophthalmologist under microscopic guidance. The preferred site of injection may vary with the morphology of the individual lesion, but the goal of the administration would be to place the composition at the advancing front of the vasculature (i.e., interspersed between the blood vessels and the normal cornea). In most cases this would involve perilimbic corneal injection to “protect” the cornea from the advancing blood vessels. This method may also be utilized shortly after a corneal insult in order to prophylactically prevent corneal neovascularization. In this situation, the material could be injected in the perilimbic cornea interspersed between the corneal lesion and its undesired potential limbic blood supply. Such methods may also be utilized in a similar fashion to prevent capillary invasion of transplanted corneas. In a sustained-release form, injections might only be required 2-3 times per year. A steroid could also be added to the injection solution to reduce inflammation resulting from the injection itself.

[0608] Within another aspect of the present invention, methods are provided for treating neovascular glaucoma, comprising the step of administering to a patient a therapeutically effective amount of a polynucleotide, polypeptide, antagonist and/or agonist to the eye, such that the formation of blood vessels is inhibited. In one embodiment, the compound may be administered topically to the eye in order to treat early forms of neovascular glaucoma. Within other embodiments, the compound may be implanted by injection into the region of the anterior chamber angle. Within other embodiments, the compound may also be placed in any location such that the compound is continuously released into the aqueous humor. Within another aspect of the present invention, methods are provided for treating proliferative diabetic retinopathy, comprising the step of administering to a patient a therapeutically effective amount of a polynucleotide, polypeptide, antagonist and/or agonist to the eyes, such that the formation of blood vessels is inhibited.

[0609] Within particularly preferred embodiments of the invention, proliferative diabetic retinopathy may be treated by injection into the aqueous humor or the vitreous, in order to increase the local concentration of the polynucleotide, polypeptide, antagonist and/or agonist in the retina. Preferably, this treatment should be initiated prior to the acquisition of severe disease requiring photocoagulation.

[0610] Within another aspect of the present invention, methods are provided for treating retrolental fibroplasia, comprising the step of administering to a patient a therapeutically effective amount of a polynucleotide, polypeptide, antagonist and/or agonist to the eye, such that the formation of blood vessels is inhibited. The compound may be administered topically, via intravitreous injection and/or via intraocular implants.

[0611] Additionally, disorders which can be treated with the polynucleotides, polypeptides, agonists and/or agonists include, but are not limited to, hemangioma, arthritis, psoriasis, angiofibroma, atherosclerotic plaques, delayed wound healing, granulations, hemophilic joints, hypertrophic scars, nonunion fractures, Osler-Weber syndrome, pyogenic granuloma, scleroderma, trachoma, and vascular adhesions.

[0612] Moreover, disorders and/or states, which can be treated, prevented, diagnosed and/or prognosed with the polynucleotides, polypeptides, agonists and/or agonists of the invention include, but are not limited to, solid tumors, blood born tumors such as leukemias, tumor metastasis, Kaposi's sarcoma, benign tumors, for example hemangiomas, acoustic neuromas, neurofibromas, trachomas, and pyogenic granulomas, rheumatoid arthritis, psoriasis, ocular angiogenic diseases, for example, diabetic retinopathy, retinopathy of prematurity, macular degeneration, corneal graft rejection, neovascular glaucoma, retrolental fibroplasia, rubeosis, retinoblastoma, and uvietis, delayed wound healing, endometriosis, vascluogenesis, granulations, hypertrophic scars (keloids), nonunion fractures, scleroderma, trachoma, vascular adhesions, myocardial angiogenesis, coronary collaterals, cerebral collaterals, arteriovenous malformations, ischemic limb angiogenesis, Osler-Webber Syndrome, plaque neovascularization, telangiectasia, hemophiliac joints, angiofibroma fibromuscular dysplasia, wound granulation, Crohn's disease, atherosclerosis, birth control agent by preventing vascularization required for embryo implantation controlling menstruation, diseases that have angiogenesis as a pathologic consequence such as cat scratch disease (Rochele minalia quintosa), ulcers (Helicobacter pylori), Bartonellosis and bacillary angiomatosis.

[0613] In one aspect of the birth control method, an amount of the compound sufficient to block embryo implantation is administered before or after intercourse and fertilization have occurred, thus providing an effective method of birth control, possibly a “morning after” method. Polynucleotides, polypeptides, agonists and/or agonists may also be used in controlling menstruation or administered as either a peritoneal lavage fluid or for peritoneal implantation in the treatment of endometriosis.

[0614] Polynucleotides, polypeptides, agonists and/or agonists of the present invention may be incorporated into surgical sutures in order to prevent stitch granulomas.

[0615] Polynucleotides, polypeptides, agonists and/or agonists may be utilized in a wide variety of surgical procedures. For example, within one aspect of the present invention a compositions (in the form of, for example, a spray or film) may be utilized to coat or spray an area prior to removal of a tumor, in order to isolate normal surrounding tissues from malignant tissue, and/or to prevent the spread of disease to surrounding tissues. Within other aspects of the present invention, compositions (e.g., in the form of a spray) may be delivered via endoscopic procedures in order to coat tumors, or inhibit angiogenesis in a desired locale. Within yet other aspects of the present invention, surgical meshes, which have been coated with anti-angiogenic compositions of the present invention may be utilized in any procedure wherein a surgical mesh might be utilized. For example, within one embodiment of the invention a surgical mesh laden with an anti-angiogenic composition may be utilized during abdominal cancer resection surgery (e.g., subsequent to colon resection) in order to provide support to the structure, and to release an amount of the anti-angiogenic factor.

[0616] Within further aspects of the present invention, methods are provided for treating tumor excision sites, comprising administering a polynucleotide, polypeptide, agonist and/or agonist to the resection margins of a tumor subsequent to excision, such that the local recurrence of cancer and the formation of new blood vessels at the site is inhibited. Within one embodiment of the invention, the anti-angiogenic compound is administered directly to the tumor excision site (e.g., applied by swabbing, brushing or otherwise coating the resection margins of the tumor with the anti-angiogenic compound). Alternatively, the anti-angiogenic compounds may be incorporated into known surgical pastes prior to administration. Within particularly preferred embodiments of the invention, the anti-angiogenic compounds are applied after hepatic resections for malignancy, and after neurosurgical operations.

[0617] Within one aspect of the present invention, polynucleotides, polypeptides, agonists and/or agonists may be administered to the resection margin of a wide variety of tumors, including for example, breast, colon, brain and hepatic tumors. For example, within one embodiment of the invention, anti-angiogenic compounds may be administered to the site of a neurological tumor subsequent to excision, such that the formation of new blood vessels at the site are inhibited.

[0618] The polynucleotides, polypeptides, agonists and/or agonists of the present invention may also be administered along with other anti-angiogenic factors. Representative examples of other anti-angiogenic factors include: Anti-Invasive Factor, retinoic acid and derivatives thereof, paclitaxel, Suramin, Tissue Inhibitor of Metalloproteinase-1, Tissue Inhibitor of Metalloproteinase-2, Plasminogen Activator Inhibitor-1, Plasminogen Activator Inhibitor-2, and various forms of the lighter “d group” transition metals.

[0619] Lighter “d group” transition metals include, for example, vanadium, molybdenum, tungsten, titanium, niobium, and tantalum species. Such transition metal species may form transition metal complexes. Suitable complexes of the above-mentioned transition metal species include oxo transition metal complexes.

[0620] Representative examples of vanadium complexes include oxo vanadium complexes such as vanadate and vanadyl complexes. Suitable vanadate complexes include metavanadate and orthovanadate complexes such as, for example, ammonium metavanadate, sodium metavanadate, and sodium orthovanadate. Suitable vanadyl complexes include, for example, vanadyl acetylacetonate and vanadyl sulfate including vanadyl sulfate hydrates such as vanadyl sulfate mono- and trihydrates.

[0621] Representative examples of tungsten and molybdenum complexes also include oxo complexes. Suitable oxo tungsten complexes include tungstate and tungsten oxide complexes. Suitable tungstate complexes include ammonium tungstate, calcium tungstate, sodium tungstate dihydrate, and tungstic acid. Suitable tungsten oxides include tungsten (IV) oxide and tungsten (VI) oxide. Suitable oxo molybdenum complexes include molybdate, molybdenum oxide, and molybdenyl complexes. Suitable molybdate complexes include ammonium molybdate and its hydrates, sodium molybdate and its hydrates, and potassium molybdate and its hydrates. Suitable molybdenum oxides include molybdenum (VI) oxide, molybdenum (VI) oxide, and molybdic acid. Suitable molybdenyl complexes include, for example, molybdenyl acetylacetonate. Other suitable tungsten and molybdenum complexes include hydroxo derivatives derived from, for example, glycerol, tartaric acid, and sugars.

[0622] A wide variety of other anti-angiogenic factors may also be utilized within the context of the present invention. Representative examples include platelet factor 4; protamine sulphate; sulphated chitin derivatives (prepared from queen crab shells), (Murata et al., Cancer Res. 51:22-26 (1991)); Sulphated Polysaccharide Peptidoglycan Complex (SP-PG) (the function of this compound may be enhanced by the presence of steroids such as estrogen, and tamoxifen citrate); Staurosporine; modulators of matrix metabolism, including for example, proline analogs, cishydroxyproline, d,L-3,4-dehydroproline, Thiaproline, alpha,alpha-dipyridyl, aminopropionitrile fumarate; 4-propyl-5-(4-pyridinyl)-2(3H)-oxazolone; Methotrexate; Mitoxantrone; Heparin; Interferons; 2 Macroglobulin-serum; ChIMP-3 (Pavloff et al., J. Bio. Chem. 267:17321-17326 (1992)); Chymostatin (Tomkinson et al., Biochem J. 286:475-480 (1992)); Cyclodextrin Tetradecasulfate; Eponemycin; Camptothecin; Fumagillin (Ingber et al., Nature 348:555-557 (1990)); Gold Sodium Thiomalate (“GST”; Matsubara and Ziff, J. Clin. Invest. 79:1440-1446 (1987)); anticollagenase-serum; alpha2-antiplasmin (Holmes et al., J. Biol. Chem. 262(4):1659-1664 (1987)); Bisantrene (National Cancer Institute); Lobenzarit disodium (N-(2)-carboxyphenyl-4-chloroanthronilic acid disodium or “CCA”; Takeuchi et al., Agents Actions 36:312-316, 1992); Thalidomide; Angostatic steroid; AGM-1470; carboxynaminoImidazole; and metalloproteinase inhibitors such as BB94.

[0623] Musculoskeletal System Disorders

[0624] Polynucleotides, polypeptides, antibodies, and/or agonists or antagonists of the present invention, may be used to treat, prevent, diagnose, and/or prognose disorders of the musculoskeletal system, including but not limited to, disorders of the bone, joints, ligaments, tendons, bursa, muscle, and/or neoplasms and cancers associated with musculoskeletal tissue.

[0625] Diseases or disorders of the bone include, but are not limited to, Albers-Schönberg disease, bowlegs, heel spurs, Köhler's bone disease, knock-knees, Legg-Calvé-Perthes disease, Marfan's syndrome, mucopolysaccharidoses, Osgood-Schlatter disease, osteochondroses, osteochondrodysplasia, osteomyelitis, osteopetroses, osteoporosis (postmenopausal, senile, and juvenile), Paget's disease, Scheuermann's disease, scoliosis, Sever's disease, and patellofemoral stress syndrome.

[0626] Joint diseases or disorders include, but are not limited to, ankylosing spondylitis, Behçet's syndrome, CREST syndrome, Ehlers-Danlos syndrome, infectious arthritis, discoid lupus erythematosus, systemic lupus erythematosus, Lyme disease, osteoarthritis, psoriatic arthritis, relapsing polychondrites, Reiter's syndrome, rheumatoid arthritis (adult and juvenile), scleroderma, and Still's disease.

[0627] Diseases or disorders affecting ligaments, tendons, or bursa include, but are not limited to, ankle sprain, bursitis, posterior Achilles tendon bursitis (Haglund's deformity), anterior Achilles tendon bursitis (Albert's disease), tendinitis, tenosynovitis, poplieus tendinitis, Achilles tendinitis, medial or lateral epicondylitis, rotator cuff tendinitis, spasmodic torticollis, and fibromyalgia syndrome.

[0628] Muscle diseases or disorders include, but are not limited to, Becker's muscular dystrophy, Duchenne's muscular dystrophy, Landouzy-Dejerine muscular dystrophy, Leyden-Möbius muscular dystrophy, Erb's muscular dystrophy, Charcot's joints, dermatomyositis, gout, pseudogout, glycogen storage diseases, Pompe's disease, mitochondrial myopathy, periodic paralysis, polymyalgia rheumatica, polymyositis, Steinert's disease, Thomsen's disease, anterolateral and posteromedial shin splints, posterior femoral muscle strain, and fibromyositis.

[0629] Musculoskeletal tissue may also develop cancers and/or neoplasms that include, but are not limited to, osteochondroma, benign chondroma, chondroblastoma, chondromyxoid fibroma, osteoid osteoma, giant cell tumor, multiple myeloma, osteosarcoma, fibrosarcoma, malignant fibrous histiocytoma, chondrosarcoma, Ewing's tumor, and malignant lymphoma of bone.

[0630] Neural Activity and Neurological Diseases

[0631] The polynucleotides, polypeptides and agonists or antagonists of the invention may be used for the diagnosis and/or treatment of diseases, disorders, damage or injury of the brain and/or nervous system. Nervous system disorders that can be treated with the compositions of the invention (e.g., polypeptides, polynucleotides, and/or agonists or antagonists), include, but are not limited to, nervous system injuries, and diseases or disorders which result in either a disconnection of axons, a diminution or degeneration of neurons, or demyelination. Nervous system lesions which may be treated in a patient (including human and non-human mammalian patients) according to the methods of the invention, include but are not limited to, the following lesions of either the central (including spinal cord, brain) or peripheral nervous systems: (1) ischemic lesions, in which a lack of oxygen in a portion of the nervous system results in neuronal injury or death, including cerebral infarction or ischemia, or spinal cord infarction or ischemia; (2) traumatic lesions, including lesions caused by physical injury or associated with surgery, for example, lesions which sever a portion of the nervous system, or compression injuries; (3) malignant lesions, in which a portion of the nervous system is destroyed or injured by malignant tissue which is either a nervous system associated malignancy or a malignancy derived from non-nervous system tissue; (4) infectious lesions, in which a portion of the nervous system is destroyed or injured as a result of infection, for example, by an abscess or associated with infection by human immunodeficiency virus, herpes zoster, or herpes simplex virus or with Lyme disease, tuberculosis, or syphilis; (5) degenerative lesions, in which a portion of the nervous system is destroyed or injured as a result of a degenerative process including but not limited to, degeneration associated with Parkinson's disease, Alzheimer's disease, Huntington's chorea, or amyotrophic lateral sclerosis (ALS); (6) lesions associated with nutritional diseases or disorders, in which a portion of the nervous system is destroyed or injured by a nutritional disorder or disorder of metabolism including, but not limited to, vitamin B12 deficiency, folic acid deficiency, Wernicke disease, tobacco-alcohol amblyopia, Marchiafava-Bignami disease (primary degeneration of the corpus callosum), and alcoholic cerebellar degeneration; (7) neurological lesions associated with systemic diseases including, but not limited to, diabetes (diabetic neuropathy, Bell's palsy), systemic lupus erythematosus, carcinoma, or sarcoidosis; (8) lesions caused by toxic substances including alcohol, lead, or particular neurotoxins; and (9) demyelinated lesions in which a portion of the nervous system is destroyed or injured by a demyelinating disease including, but not limited to, multiple sclerosis, human immunodeficiency virus-associated myelopathy, transverse myelopathy or various etiologies, progressive multifocal leukoencephalopathy, and central pontine myelinolysis.

[0632] In one embodiment, the polypeptides, polynucleotides, or agonists or antagonists of the invention are used to protect neural cells from the damaging effects of hypoxia. In a further preferred embodiment, the polypeptides, polynucleotides, or agonists or antagonists of the invention are used to protect neural cells from the damaging effects of cerebral hypoxia. According to this embodiment, the compositions of the invention are used to treat or prevent neural cell injury associated with cerebral hypoxia. In one non-exclusive aspect of this embodiment, the polypeptides, polynucleotides, or agonists or antagonists of the invention, are used to treat or prevent neural cell injury associated with cerebral ischemia. In another non-exclusive aspect of this embodiment, the polypeptides, polynucleotides, or agonists or antagonists of the invention are used to treat or prevent neural cell injury associated with cerebral infarction.

[0633] In another preferred embodiment, the polypeptides, polynucleotides, or agonists or antagonists of the invention are used to treat or prevent neural cell injury associated with a stroke. In a specific embodiment, the polypeptides, polynucleotides, or agonists or antagonists of the invention are used to treat or prevent cerebral neural cell injury associated with a stroke.

[0634] In another preferred embodiment, the polypeptides, polynucleotides, or agonists or antagonists of the invention are used to treat or prevent neural cell injury associated with a heart attack. In a specific embodiment, the polypeptides, polynucleotides, or agonists or antagonists of the invention are used to treat or prevent cerebral neural cell injury associated with a heart attack.

[0635] The compositions of the invention which are useful for treating or preventing a nervous system disorder may be selected by testing for biological activity in promoting the survival or differentiation of neurons. For example, and not by way of limitation, compositions of the invention which elicit any of the following effects may be useful according to the invention: (1) increased survival time of neurons in culture either in the presence or absence of hypoxia or hypoxic conditions; (2) increased sprouting of neurons in culture or in vivo; (3) increased production of a neuron-associated molecule in culture or in vivo, e.g., choline acetyltransferase or acetylcholinesterase with respect to motor neurons; or (4) decreased symptoms of neuron dysfunction in vivo. Such effects may be measured by any method known in the art. In preferred, non-limiting embodiments, increased survival of neurons may routinely be measured using a method set forth herein or otherwise known in the art, such as, for example, in Zhang et al., Proc Natl Acad Sci USA 97:3637-42 (2000) or in Arakawa et al., J. Neurosci., 10:3507-15 (1990); increased sprouting of neurons may be detected by methods known in the art, such as, for example, the methods set forth in Pestronk et al., Exp. Neurol., 70:65-82 (1980), or Brown et al., Ann. Rev. Neurosci., 4:17-42 (1981); increased production of neuron-associated molecules may be measured by bioassay, enzymatic assay, antibody binding, Northern blot assay, etc., using techniques known in the art and depending on the molecule to be measured; and motor neuron dysfunction may be measured by assessing the physical manifestation of motor neuron disorder, e.g., weakness, motor neuron conduction velocity, or functional disability.

[0636] In specific embodiments, motor neuron disorders that may be treated according to the invention include, but are not limited to, disorders such as infarction, infection, exposure to toxin, trauma, surgical damage, degenerative disease or malignancy that may affect motor neurons as well as other components of the nervous system, as well as disorders that selectively affect neurons such as amyotrophic lateral sclerosis, and including, but not limited to, progressive spinal muscular atrophy, progressive bulbar palsy, primary lateral sclerosis, infantile and juvenile muscular atrophy, progressive bulbar paralysis of childhood (Fazio-Londe syndrome), poliomyelitis and the post polio syndrome, and Hereditary Motorsensory Neuropathy (Charcot-Marie-Tooth Disease).

[0637] Further, polypeptides or polynucleotides of the invention may play a role in neuronal survival; synapse formation; conductance; neural differentiation, etc. Thus, compositions of the invention (including polynucleotides, polypeptides, and agonists or antagonists) may be used to diagnose and/or treat or prevent diseases or disorders associated with these roles, including, but not limited to, learning and/or cognition disorders. The compositions of the invention may also be useful in the treatment or prevention of neurodegenerative disease states and/or behavioural disorders. Such neurodegenerative disease states and/or behavioral disorders include, but are not limited to, Alzheimer's Disease, Parkinson's Disease, Huntington's Disease, Tourette Syndrome, schizophrenia, mania, dementia, paranoia, obsessive compulsive disorder, panic disorder, learning disabilities, ALS, psychoses, autism, and altered behaviors, including disorders in feeding, sleep patterns, balance, and perception. In addition, compositions of the invention may also play a role in the treatment, prevention and/or detection of developmental disorders associated with the developing embryo, or sexually-linked disorders.

[0638] Additionally, polypeptides, polynucleotides and/or agonists or antagonists of the invention, may be useful in protecting neural cells from diseases, damage, disorders, or injury, associated with cerebrovascular disorders including, but not limited to, carotid artery diseases (e.g., carotid artery thrombosis, carotid stenosis, or Moyamoya Disease), cerebral amyloid angiopathy, cerebral aneurysm, cerebral anoxia, cerebral arteriosclerosis, cerebral arteriovenous malformations, cerebral artery diseases, cerebral embolism and thrombosis (e.g., carotid artery thrombosis, sinus thrombosis, or Wallenberg's Syndrome), cerebral hemorrhage (e.g., epidural or subdural hematoma, or subarachnoid hemorrhage), cerebral infarction, cerebral ischemia (e.g., transient cerebral ischemia, Subclavian Steal Syndrome, or vertebrobasilar insufficiency), vascular dementia (e.g., multi-infarct), leukomalacia, periventricular, and vascular headache (e.g., cluster headache or migraines).

[0639] In accordance with yet a further aspect of the present invention, there is provided a process for utilizing polynucleotides or polypeptides, as well as agonists or antagonists of the present invention, for therapeutic purposes, for example, to stimulate neurological cell proliferation and/or differentiation. Therefore, polynucleotides, polypeptides, agonists and/or antagonists of the invention may be used to treat and/or detect neurologic diseases. Moreover, polynucleotides or polypeptides, or agonists or antagonists of the invention, can be used as a marker or detector of a particular nervous system disease or disorder.

[0640] Examples of neurologic diseases which can be treated or detected with polynucleotides, polypeptides, agonists, and/or antagonists of the present invention include brain diseases, such as metabolic brain diseases which includes phenylketonuria such as maternal phenylketonuria, pyruvate carboxylase deficiency, pyruvate dehydrogenase complex deficiency, Wernicke's Encephalopathy, brain edema, brain neoplasms such as cerebellar neoplasms which include infratentorial neoplasms, cerebral ventricle neoplasms such as choroid plexus neoplasms, hypothalamic neoplasms, supratentorial neoplasms, canavan disease, cerebellar diseases such as cerebellar ataxia which include spinocerebellar degeneration such as ataxia telangiectasia, cerebellar dyssynergia, Friederich's Ataxia, Machado-Joseph Disease, olivopontocerebellar atrophy, cerebellar neoplasms such as infratentorial neoplasms, diffuse cerebral sclerosis such as encephalitis periaxialis, globoid cell leukodystrophy, metachromatic leukodystrophy and subacute sclerosing panencephalitis.

[0641] Additional neurologic diseases which can be treated or detected with polynucleotides, polypeptides, agonists, and/or antagonists of the present invention include cerebrovascular disorders (such as carotid artery diseases which include carotid artery thrombosis, carotid stenosis and Moyamoya Disease), cerebral amyloid angiopathy, cerebral aneurysm, cerebral anoxia, cerebral arteriosclerosis, cerebral arteriovenous malformations, cerebral artery diseases, cerebral embolism and thrombosis such as carotid artery thrombosis, sinus thrombosis and Wallenberg's Syndrome, cerebral hemorrhage such as epidural hematoma, subdural hematoma and subarachnoid hemorrhage, cerebral infarction, cerebral ischemia such as transient cerebral ischemia, Subclavian Steal Syndrome and vertebrobasilar insufficiency, vascular dementia such as multi-infarct dementia, periventricular leukomalacia, vascular headache such as cluster headache and migraine.

[0642] Additional neurologic diseases which can be treated or detected with polynucleotides, polypeptides, agonists, and/or antagonists of the present invention include dementia such as AIDS Dementia Complex, presenile dementia such as Alzheimer's Disease and Creutzfeldt-Jakob Syndrome, senile dementia such as Alzheimer's Disease and progressive supranuclear palsy, vascular dementia such as multi-infarct dementia, encephalitis which include encephalitis periaxialis, viral encephalitis such as epidemic encephalitis, Japanese Encephalitis, St. Louis Encephalitis, tick-borne encephalitis and West Nile Fever, acute disseminated encephalomyelitis, meningoencephalitis such as uveomeningoencephalitic syndrome, Postencephalitic Parkinson Disease and subacute sclerosing panencephalitis, encephalomalacia such as periventricular leukomalacia, epilepsy such as generalized epilepsy which includes infantile spasms, absence epilepsy, myoclonic epilepsy which includes MERRF Syndrome, tonic-clonic epilepsy, partial epilepsy such as complex partial epilepsy, frontal lobe epilepsy and temporal lobe epilepsy, post-traumatic epilepsy, status epilepticus such as Epilepsia Partialis Continua, and Hallervorden-Spatz Syndrome.

[0643] Additional neurologic diseases which can be treated or detected with polynucleotides, polypeptides, agonists, and/or antagonists of the present invention include hydrocephalus such as Dandy-Walker Syndrome and normal pressure hydrocephalus, hypothalamic diseases such as hypothalamic neoplasms, cerebral malaria, narcolepsy which includes cataplexy, bulbar poliomyelitis, cerebri pseudotumor, Rett Syndrome, Reye's Syndrome, thalamic diseases, cerebral toxoplasmosis, intracranial tuberculoma and Zellweger Syndrome, central nervous system infections such as AIDS Dementia Complex, Brain Abscess, subdural empyema, encephalomyelitis such as Equine Encephalomyelitis, Venezuelan Equine Encephalomyelitis, Necrotizing Hemorrhagic Encephalomyelitis, Visna, and cerebral malaria.

[0644] Additional neurologic diseases which can be treated or detected with polynucleotides, polypeptides, agonists, and/or antagonists of the present invention include meningitis such as arachnoiditis, aseptic meningtitis such as viral meningtitis which includes lymphocytic choriomeningitis, Bacterial meningtitis which includes Haemophilus Meningtitis, Listeria Meningtitis, Meningococcal Meningtitis such as Waterhouse-Friderichsen Syndrome, Pneumococcal Meningtitis and meningeal tuberculosis, fungal meningitis such as Cryptococcal Meningtitis, subdural effusion, meningoencephalitis such as uvemeningoencephalitic syndrome, myelitis such as transverse myelitis, neurosyphilis such as tabes dorsalis, poliomyelitis which includes bulbar poliomyelitis and postpoliomyelitis syndrome, prion diseases (such as Creutzfeldt-Jakob Syndrome, Bovine Spongiform Encephalopathy, Gerstmann-Straussler Syndrome, Kuru, Scrapie), and cerebral toxoplasmosis.

[0645] Additional neurologic diseases which can be treated or detected with polynucleotides, polypeptides, agonists, and/or antagonists of the present invention include central nervous system neoplasms such as brain neoplasms that include cerebellar neoplasms such as infratentorial neoplasms, cerebral ventricle neoplasms such as choroid plexus neoplasms, hypothalamic neoplasms and supratentorial neoplasms, meningeal neoplasms, spinal cord neoplasms which include epidural neoplasms, demyelinating diseases such as Canavan Diseases, diffuse cerebral sceloris which includes adrenoleukodystrophy, encephalitis periaxialis, globoid cell leukodystrophy, diffuse cerebral sclerosis such as metachromatic leukodystrophy, allergic encephalomyelitis, necrotizing hemorrhagic encephalomyelitis, progressive multifocal leukoencephalopathy, multiple sclerosis, central pontine myelinolysis, transverse myelitis, neuromyelitis optica, Scrapie, Swayback, Chronic Fatigue Syndrome, Visna, High Pressure Nervous Syndrome, Meningism, spinal cord diseases such as amyotonia congenita, amyotrophic lateral sclerosis, spinal muscular atrophy such as Werdnig-Hoffmann Disease, spinal cord compression, spinal cord neoplasms such as epidural neoplasms, syringomyelia, Tabes Dorsalis, Stiff-Man Syndrome, mental retardation such as Angelman Syndrome, Cri-du-Chat Syndrome, De Lange's Syndrome, Down Syndrome, Gangliosidoses such as gangliosidoses G(M1), Sandhoff Disease, Tay-Sachs Disease, Hartnup Disease, homocystinuria, Laurence-Moon-Biedl Syndrome, Lesch-Nyhan Syndrome, Maple Syrup Urine Disease, mucolipidosis such as fucosidosis, neuronal ceroid-lipofuscinosis, oculocerebrorenal syndrome, phenylketonuria such as maternal phenylketonuria, Prader-Willi Syndrome, Rett Syndrome, Rubinstein-Taybi Syndrome, Tuberous Sclerosis, WAGR Syndrome, nervous system abnormalities such as holoprosencephaly, neural tube defects such as anencephaly which includes hydrangencephaly, Arnold-Chairi Deformity, encephalocele, meningocele, meningomyelocele, spinal dysraphism such as spina bifida cystica and spina bifida occulta.

[0646] Additional neurologic diseases which can be treated or detected with polynucleotides, polypeptides, agonists, and/or antagonists of the present invention include hereditary motor and sensory neuropathies which include Charcot-Marie Disease, Hereditary optic atrophy, Refsum's Disease, hereditary spastic paraplegia, Werdnig-Hoffmann Disease, Hereditary Sensory and Autonomic Neuropathies such as Congenital Analgesia and Familial Dysautonomia, Neurologic manifestations (such as agnosia that include Gerstmann's Syndrome, Amnesia such as retrograde amnesia, apraxia, neurogenic bladder, cataplexy, communicative disorders such as hearing disorders that includes deafness, partial hearing loss, loudness recruitment and tinnitus, language disorders such as aphasia which include agraphia, anomia, broca aphasia, and Wernicke Aphasia, Dyslexia such as Acquired Dyslexia, language development disorders, speech disorders such as aphasia which includes anomia, broca aphasia and Wernicke Aphasia, articulation disorders, communicative disorders such as speech disorders which include dysarthria, echolalia, mutism and stuttering, voice disorders such as aphonia and hoarseness, decerebrate state, delirium, fasciculation, hallucinations, meningism, movement disorders such as angelman syndrome, ataxia, athetosis, chorea, dystonia, hypokinesia, muscle hypotonia, myoclonus, tic, torticollis and tremor, muscle hypertonia such as muscle rigidity such as stiff-man syndrome, muscle spasticity, paralysis such as facial paralysis which includes Herpes Zoster Oticus, Gastroparesis, Hemiplegia, ophthalmoplegia such as diplopia, Duane's Syndrome, Homer's Syndrome, Chronic progressive external ophthalmoplegia such as Kearns Syndrome, Bulbar Paralysis, Tropical Spastic Paraparesis, Paraplegia such as Brown-Sequard Syndrome, quadriplegia, respiratory paralysis and vocal cord paralysis, paresis, phantom limb, taste disorders such as ageusia and dysgeusia, vision disorders such as amblyopia, blindness, color vision defects, diplopia, hemianopsia, scotoma and subnormal vision, sleep disorders such as hypersomnia which includes Kleine-Levin Syndrome, insomnia, and somnambulism, spasm such as trismus, unconsciousness such as coma, persistent vegetative state and syncope and vertigo, neuromuscular diseases such as amyotonia congenita, amyotrophic lateral sclerosis, Lambert-Eaton Myasthenic Syndrome, motor neuron disease, muscular atrophy such as spinal muscular atrophy, Charcot-Marie Disease and Werdnig-Hoffmann Disease, Postpoliomyelitis Syndrome, Muscular Dystrophy, Myasthenia Gravis, Myotonia Atrophica, Myotonia Confenita, Nemaline Myopathy, Familial Periodic Paralysis, Multiplex Paramyloclonus, Tropical Spastic Paraparesis and Stiff-Man Syndrome, peripheral nervous system diseases such as acrodynia, amyloid neuropathies, autonomic nervous system diseases such as Adie's Syndrome, Barre-Lieou Syndrome, Familial Dysautonomia, Horner's Syndrome, Reflex Sympathetic Dystrophy and Shy-Drager Syndrome, Cranial Nerve Diseases such as Acoustic Nerve Diseases such as Acoustic Neuroma which includes Neurofibromatosis 2, Facial Nerve Diseases such as Facial Neuralgia, Melkersson-Rosenthal Syndrome, ocular motility disorders which includes amblyopia, nystagmus, oculomotor nerve paralysis, ophthalmoplegia such as Duane's Syndrome, Horner's Syndrome, Chronic Progressive External Ophthalmoplegia which includes Kearns Syndrome, Strabismus such as Esotropia and Exotropia, Oculomotor Nerve Paralysis, Optic Nerve Diseases such as Optic Atrophy which includes Hereditary Optic Atrophy, Optic Disk Drusen, Optic Neuritis such as Neuromyelitis Optica, Papilledema, Trigeminal Neuralgia, Vocal Cord Paralysis, Demyelinating Diseases such as Neuromyelitis Optica and Swayback, and Diabetic neuropathies such as diabetic foot.

[0647] Additional neurologic diseases which can be treated or detected with polynucleotides, polypeptides, agonists, and/or antagonists of the present invention include nerve compression syndromes such as carpal tunnel syndrome, tarsal tunnel syndrome, thoracic outlet syndrome such as cervical rib syndrome, ulnar nerve compression syndrome, neuralgia such as causalgia, cervico-brachial neuralgia, facial neuralgia and trigeminal neuralgia, neuritis such as experimental allergic neuritis, optic neuritis, polyneuritis, polyradiculoneuritis and radiculities such as polyradiculitis, hereditary motor and sensory neuropathies such as Charcot-Marie Disease, Hereditary Optic Atrophy, Refsum's Disease, Hereditary Spastic Paraplegia and Werdnig-Hoffmann Disease, Hereditary Sensory and Autonomic Neuropathies which include Congenital Analgesia and Familial Dysautonomia, POEMS Syndrome, Sciatica, Gustatory Sweating and Tetany).

[0648] Gastrointestinal Disorders

[0649] Polynucleotides or polypeptides, or agonists or antagonists of the present invention, may be used to treat, prevent, diagnose, and/or prognose gastrointestinal disorders, including inflammatory diseases and/or conditions, infections, cancers (e.g., intestinal neoplasms (carcinoid tumor of the small intestine, non-Hodgkin's lymphoma of the small intestine, small bowl lymphoma)), and ulcers, such as peptic ulcers.

[0650] Gastrointestinal disorders include dysphagia, odynophagia, inflammation of the esophagus, peptic esophagitis, gastric reflux, submucosal fibrosis and stricturing, Mallory-Weiss lesions, leiomyomas, lipomas, epidermal cancers, adeoncarcinomas, gastric retention disorders, gastroenteritis, gastric atrophy, gastric/stomach cancers, polyps of the stomach, autoimmune disorders such as pernicious anemia, pyloric stenosis, gastritis (bacterial, viral, eosinophilic, stress-induced, chronic erosive, atrophic, plasma cell, and Ménétrier's), and peritoneal diseases (e.g., chyloperioneum, hemoperitoneum, mesenteric cyst, mesenteric lymphadenitis, mesenteric vascular occlusion, panniculitis, neoplasms, peritonitis, pneumoperitoneum, bubphrenic abscess).

[0651] Gastrointestinal disorders also include disorders associated with the small intestine, such as malabsorption syndromes, distension, irritable bowel syndrome, sugar intolerance, celiac disease, duodenal ulcers, duodenitis, tropical sprue, Whipple's disease, intestinal lymphangiectasia, Crohn's disease, appendicitis, obstructions of the ileum, Meckel's diverticulum, multiple diverticula, failure of complete rotation of the small and large intestine, lymphoma, and bacterial and parasitic diseases (such as Traveler's diarrhea, typhoid and paratyphoid, cholera, infection by Roundworms (Ascariasis lumbricoides), Hookworms (Ancylostoma duodenale), Threadworms (Enterobius vermicularis), Tapeworms (Taenia saginata, Echinococcus granulosus, Diphyllobothrium spp., and T. solium).

[0652] Liver diseases and/or disorders include intrahepatic cholestasis (alagille syndrome, biliary liver cirrhosis), fatty liver (alcoholic fatty liver, reye syndrome), hepatic vein thrombosis, hepatolentricular degeneration, hepatomegaly, hepatopulmonary syndrome, hepatorenal syndrome, portal hypertension (esophageal and gastric varices), liver abscess (amebic liver abscess), liver cirrhosis (alcoholic, biliary and experimental), alcoholic liver diseases (fatty liver, hepatitis, cirrhosis), parasitic (hepatic echinococcosis, fascioliasis, amebic liver abscess), jaundice (hemolytic, hepatocellular, and cholestatic), cholestasis, portal hypertension, liver enlargement, ascites, hepatitis (alcoholic hepatitis, animal hepatitis, chronic hepatitis (autoimmune, hepatitis B, hepatitis C, hepatitis D, drug induced), toxic hepatitis, viral human hepatitis (hepatitis A, hepatitis B, hepatitis C, hepatitis D, hepatitis E), Wilson's disease, granulomatous hepatitis, secondary biliary cirrhosis, hepatic encephalopathy, portal hypertension, varices, hepatic encephalopathy, primary biliary cirrhosis, primary sclerosing cholangitis, hepatocellular adenoma, hemangiomas, bile stones, liver failure (hepatic encephalopathy, acute liver failure), and liver neoplasms (angiomyolipoma, calcified liver metastases, cystic liver metastases, epithelial tumors, fibrolamellar hepatocarcinoma, focal nodular hyperplasia, hepatic adenoma, hepatobiliary cystadenoma, hepatoblastoma, hepatocellular carcinoma, hepatoma, liver cancer, liver hemangioendothelioma, mesenchymal hamartoma, mesenchymal tumors of liver, nodular regenerative hyperplasia, benign liver tumors (Hepatic cysts [Simple cysts, Polycystic liver disease, Hepatobiliary cystadenoma, Choledochal cyst], Mesenchymal tumors [Mesenchymal hamartoma, Infantile hemangioendothelioma, Hemangioma, Peliosis hepatis, Lipomas, Inflammatory pseudotumor, Miscellaneous], Epithelial tumors [Bile duct epithelium (Bile duct hamartoma, Bile duct adenoma), Hepatocyte (Adenoma, Focal nodular hyperplasia, Nodular regenerative hyperplasia)], malignant liver tumors [hepatocellular, hepatoblastoma, hepatocellular carcinoma, cholangiocellular, cholangiocarcinoma, cystadenocarcinoma, tumors of blood vessels, angiosarcoma, Karposi's sarcoma, hemangioendothelioma, other tumors, embryonal sarcoma, fibrosarcoma, leiomyosarcoma, rhabdomyosarcoma, carcinosarcoma, teratoma, carcinoid, squamous carcinoma, primary lymphoma]), peliosis hepatis, erythrohepatic porphyria, hepatic porphyria (acute intermittent porphyria, porphyria cutanea tarda), Zellweger syndrome).

[0653] Pancreatic diseases and/or disorders include acute pancreatitis, chronic pancreatitis (acute necrotizing pancreatitis, alcoholic pancreatitis), neoplasms (adenocarcinoma of the pancreas, cystadenocarcinoma, insulinoma, gastrinoma, and glucagonoma, cystic neoplasms, islet-cell tumors, pancreoblastoma), and other pancreatic diseases (e.g., cystic fibrosis, cyst (pancreatic pseudocyst, pancreatic fistula, insufficiency)).

[0654] Gallbladder diseases include gallstones (cholelithiasis and choledocholithiasis), postcholecystectomy syndrome, diverticulosis of the gallbladder, acute cholecystitis, chronic cholecystitis, bile duct tumors, and mucocele.

[0655] Diseases and/or disorders of the large intestine include antibiotic-associated colitis, diverticulitis, ulcerative colitis, acquired megacolon, abscesses, fungal and bacterial infections, anorectal disorders (e.g., fissures, hemorrhoids), colonic diseases (colitis, colonic neoplasms [colon cancer, adenomatous colon polyps (e.g., villous adenoma), colon carcinoma, colorectal cancer], colonic diverticulitis, colonic diverticulosis, megacolon [Hirschsprung disease, toxic megacolon]; sigmoid diseases [proctocolitis, sigmoin neoplasms]), constipation, Crohn's disease, diarrhea (infantile diarrhea, dysentery), duodenal diseases (duodenal neoplasms, duodenal obstruction, duodenal ulcer, duodenitis), enteritis (enterocolitis), HIV enteropathy, ileal diseases (ileal neoplasms, ileitis), immunoproliferative small intestinal disease, inflammatory bowel disease (ulcerative colitis, Crohn's disease), intestinal atresia, parasitic diseases (anisakiasis, balantidiasis, blastocystis infections, cryptosporidiosis, dientamoebiasis, amebic dysentery, giardiasis), intestinal fistula (rectal fistula), intestinal neoplasms (cecal neoplasms, colonic neoplasms, duodenal neoplasms, ileal neoplasms, intestinal polyps, jejunal neoplasms, rectal neoplasms), intestinal obstruction (afferent loop syndrome, duodenal obstruction, impacted feces, intestinal pseudo-obstruction [cecal volvulus], intussusception), intestinal perforation, intestinal polyps (colonic polyps, gardner syndrome, peutz-jeghers syndrome), jejunal diseases (jejunal neoplasms), malabsorption syndromes (blind loop syndrome, celiac disease, lactose intolerance, short bowl syndrome, tropical sprue, whipple's disease), mesenteric vascular occlusion, pneumatosis cystoides intestinalis, protein-losing enteropathies (intestinal lymphagiectasis), rectal diseases (anus diseases, fecal incontinence, hemorrhoids, proctitis, rectal fistula, rectal prolapse, rectocele), peptic ulcer (duodenal ulcer, peptic esophagitis, hemorrhage, perforation, stomach ulcer, Zollinger-Ellison syndrome), postgastrectomy syndromes (dumping syndrome), stomach diseases (e.g., achlorhydria, duodenogastric reflux (bile reflux), gastric antral vascular ectasia, gastric fistula, gastric outlet obstruction, gastritis (atrophic or hypertrophic), gastroparesis, stomach dilatation, stomach diverticulum, stomach neoplasms (gastric cancer, gastric polyps, gastric adenocarcinoma, hyperplastic gastric polyp), stomach rupture, stomach ulcer, stomach volvulus), tuberculosis, visceroptosis, vomiting (e.g., hematemesis, hyperemesis gravidarum, postoperative nausea and vomiting) and hemorrhagic colitis.

[0656] Further diseases and/or disorders of the gastrointestinal system include biliary tract diseases, such as, gastroschisis, fistula (e.g., biliary fistula, esophageal fistula, gastric fistula, intestinal fistula, pancreatic fistula), neoplasms (e.g., biliary tract neoplasms, esophageal neoplasms, such as adenocarcinoma of the esophagus, esophageal squamous cell carcinoma, gastrointestinal neoplasms, pancreatic neoplasms, such as adenocarcinoma of the pancreas, mucinous cystic neoplasm of the pancreas, pancreatic cystic neoplasms, pancreatoblastoma, and peritoneal neoplasms), esophageal disease (e.g., bullous diseases, candidiasis, glycogenic acanthosis, ulceration, barrett esophagus varices, atresia, cyst, diverticulum (e.g., Zenker's diverticulum), fistula (e.g., tracheoesophageal fistula), motility disorders (e.g., CREST syndrome, deglutition disorders, achalasia, spasm, gastroesophageal reflux), neoplasms, perforation (e.g., Boerhaave syndrome, Mallory-Weiss syndrome), stenosis, esophagitis, diaphragmatic hernia (e.g., hiatal hernia); gastrointestinal diseases, such as, gastroenteritis (e.g., cholera morbus, norwalk virus infection), hemorrhage (e.g., hematemesis, melena, peptic ulcer hemorrhage), stomach neoplasms (gastric cancer, gastric polyps, gastric adenocarcinoma, stomach cancer)), hernia (e.g., congenital diaphragmatic hernia, femoral hernia, inguinal hernia, obturator hernia, umbilical hernia, ventral hernia), and intestinal diseases (e.g., cecal diseases (appendicitis, cecal neoplasms)).

[0657] Reproductive System Disorders

[0658] The polynucleotides or polypeptides, or agonists or antagonists of the invention may be used for the diagnosis, treatment, or prevention of diseases and/or disorders of the reproductive system. Reproductive system disorders that can be treated by the compositions of the invention, include, but are not limited to, reproductive system injuries, infections, neoplastic disorders, congenital defects, and diseases or disorders which result in infertility, complications with pregnancy, labor, or parturition, and postpartum difficulties.

[0659] Reproductive system disorders and/or diseases include diseases and/or disorders of the testes, including, but not limited to, testicular atrophy, testicular feminization, cryptorchism (unilateral and bilateral), anorchia, ectopic testis, epididymitis and orchitis (typically resulting from infections such as, for example, gonorrhea, mumps, tuberculosis, and syphilis), testicular torsion, vasitis nodosa, germ cell tumors (e.g., seminomas, embryonal cell carcinomas, teratocarcinomas, choriocarcinomas, yolk sac tumors, and teratomas), stromal tumors (e.g., Leydig cell tumors), hydrocele, hematocele, varicocele, spermatocele, inguinal hernia, and disorders of sperm production (e.g., immotile cilia syndrome, aspermia, asthenozoospermia, azoospermia, oligospermia, and teratozoospermia).

[0660] Reproductive system disorders also include, but are not limited to, disorders of the prostate gland, such as acute non-bacterial prostatitis, chronic non-bacterial prostatitis, acute bacterial prostatitis, chronic bacterial prostatitis, prostatodystonia, prostatosis, granulomatous prostatitis, malacoplakia, benign prostatic hypertrophy or hyperplasia, and prostate neoplastic disorders, including adenocarcinomas, transitional cell carcinomas, ductal carcinomas, and squamous cell carcinomas.

[0661] Additionally, the compositions of the invention may be useful in the diagnosis, treatment, and/or prevention of disorders or diseases of the penis and urethra, including, but not limited to, inflammatory disorders, such as balanoposthitis, balanitis xerotica obliterans, phimosis, paraphimosis, syphilis, herpes simplex virus, gonorrhea, non-gonococcal urethritis, chlamydia, mycoplasma, trichomonas, HIV, AIDS, Reiter's syndrome, condyloma acuminatum, condyloma latum, and pearly penile papules; urethral abnormalities, such as hypospadias, epispadias, and phimosis; premalignant lesions, including Erythroplasia of Queyrat, Bowen's disease, Bowenoid paplosis, giant condyloma of Buscke-Lowenstein, and varrucous carcinoma; penile cancers, including squamous cell carcinomas, carcinoma in situ, verrucous carcinoma, and disseminated penile carcinoma; urethral neoplastic disorders, including penile urethral carcinoma, bulbomembranous urethral carcinoma, and prostatic urethral carcinoma; and erectile disorders, such as priapism, Peyronie's disease, erectile dysfunction, and impotence.

[0662] Moreover, diseases and/or disorders of the vas deferens include, but are not limited to, vasculititis and CBAVD (congenital bilateral absence of the vas deferens); additionally, the polynucleotides, polypeptides, and agonists or antagonists of the present invention may be used in the diagnosis, treatment, and/or prevention of diseases and/or disorders of the seminal vesicles, including but not limited to, hydatid disease, congenital chloride diarrhea, and polycystic kidney disease.

[0663] Other disorders and/or diseases of the male reproductive system that may be diagnosed, treated, and/or prevented with the compositions of the invention include, but are not limited to, Klinefelter's syndrome, Young's syndrome, premature ejaculation, diabetes mellitus, cystic fibrosis, Kartagener's syndrome, high fever, multiple sclerosis, and gynecomastia.

[0664] Further, the polynucleotides, polypeptides, and agonists or antagonists of the present invention may be used in the diagnosis, treatment, and/or prevention of diseases and/or disorders of the vagina and vulva, including, but not limited to, bacterial vaginosis, candida vaginitis, herpes simplex virus, chancroid, granuloma inguinale, lymphogranuloma venereum, scabies, human papillomavirus, vaginal trauma, vulvar trauma, adenosis, chlamydia vaginitis, gonorrhea, trichomonas vaginitis, condyloma acuminatum, syphilis, molluscum contagiosum, atrophic vaginitis, Paget's disease, lichen sclerosus, lichen planus, vulvodynia, toxic shock syndrome, vaginismus, vulvovaginitis, vulvar vestibulitis, and neoplastic disorders, such as squamous cell hyperplasia, clear cell carcinoma, basal cell carcinoma, melanomas, cancer of Bartholin's gland, and vulvar intraepithelial neoplasia.

[0665] Disorders and/or diseases of the uterus that may be diagnosed, treated, and/or prevented with the compositions of the invention include, but are not limited to, dysmenorrhea, retroverted uterus, endometriosis, fibroids, adenomyosis, anovulatory bleeding, amenorrhea, Cushing's syndrome, hydatidiform moles, Asherman's syndrome, premature menopause, precocious puberty, uterine polyps, dysfunctional uterine bleeding (e.g., due to aberrant hormonal signals), and neoplastic disorders, such as adenocarcinomas, keiomyosarcomas, and sarcomas. Additionally, the polypeptides, polynucleotides, or agonists or antagonists of the invention may be useful as a marker or detector of, as well as in the diagnosis, treatment, and/or prevention of congenital uterine abnormalities, such as bicornuate uterus, septate uterus, simple unicornuate uterus, unicornuate uterus with a noncavitary rudimentary horn, unicornuate uterus with a non-communicating cavitary rudimentary horn, unicornuate uterus with a communicating cavitary horn, arcuate uterus, uterine didelfus, and T-shaped uterus.

[0666] Ovarian diseases and/or disorders that may be diagnosed, treated, and/or prevented with the compositions of the invention include, but are not limited to, anovulation, polycystic ovary syndrome (Stein-Leventhal syndrome), ovarian cysts, ovarian hypofunction, ovarian insensitivity to gonadotropins, ovarian overproduction of androgens, right ovarian vein syndrome, amenorrhea, hirutism, and ovarian cancer (including, but not limited to, primary and secondary cancerous growth, Sertoli-Leydig tumors, endometriod carcinoma of the ovary, ovarian papillary serous adenocarcinoma, ovarian mucinous adenocarcinoma, and Ovarian Krukenberg tumors).

[0667] Cervical diseases and/or disorders that may be diagnosed, treated, and/or prevented with the compositions of the invention include, but are not limited to, cervicitis, chronic cervicitis, mucopurulent cervicitis, cervical dysplasia, cervical polyps, Nabothian cysts, cervical erosion, cervical incompetence, and cervical neoplasms (including, for example, cervical carcinoma, squamous metaplasia, squamous cell carcinoma, adenosquamous cell neoplasia, and columnar cell neoplasia).

[0668] Additionally, diseases and/or disorders of the reproductive system that may be diagnosed, treated, and/or prevented with the compositions of the invention include, but are not limited to, disorders and/or diseases of pregnancy, including miscarriage and stillbirth, such as early abortion, late abortion, spontaneous abortion, induced abortion, therapeutic abortion, threatened abortion, missed abortion, incomplete abortion, complete abortion, habitual abortion, missed abortion, and septic abortion; ectopic pregnancy, anemia, Rh incompatibility, vaginal bleeding during pregnancy, gestational diabetes, intrauterine growth retardation, polyhydramnios, HELLP syndrome, abruptio placentae, placenta previa, hyperemesis, preeclampsia, eclampsia, herpes gestationis, and urticaria of pregnancy. Additionally, the polynucleotides, polypeptides, and agonists or antagonists of the present invention may be used in the diagnosis, treatment, and/or prevention of diseases that can complicate pregnancy, including heart disease, heart failure, rheumatic heart disease, congenital heart disease, mitral valve prolapse, high blood pressure, anemia, kidney disease, infectious disease (e.g., rubella, cytomegalovirus, toxoplasmosis, infectious hepatitis, chlamydia, HIV, AIDS, and genital herpes), diabetes mellitus, Graves' disease, thyroiditis, hypothyroidism, Hashimoto's thyroiditis, chronic active hepatitis, cirrhosis of the liver, primary biliary cirrhosis, asthma, systemic lupus eryematosis, rheumatoid arthritis, myasthenia gravis, idiopathic thrombocytopenic purpura, appendicitis, ovarian cysts, gallbladder disorders,and obstruction of the intestine.

[0669] Complications associated with labor and parturition that may be diagnosed, treated, and/or prevented with the compositions of the invention include, but are not limited to, premature rupture of the membranes, pre-term labor, post-term pregnancy, postmaturity, labor that progresses too slowly, fetal distress (e.g., abnormal heart rate (fetal or maternal), breathing problems, and abnormal fetal position), shoulder dystocia, prolapsed umbilical cord, amniotic fluid embolism, and aberrant uterine bleeding.

[0670] Further, diseases and/or disorders of the postdelivery period, that may be diagnosed, treated, and/or prevented with the compositions of the invention, include, but are not limited to, endometritis, myometritis, parametritis, peritonitis, pelvic thrombophlebitis, pulmonary embolism, endotoxemia, pyelonephritis, saphenous thrombophlebitis, mastitis, cystitis, postpartum hemorrhage, and inverted uterus.

[0671] Other disorders and/or diseases of the female reproductive system that may be diagnosed, treated, and/or prevented by the polynucleotides, polypeptides, and agonists or antagonists of the present invention include, but are not limited to, Turner's syndrome, pseudohermaphroditism, premenstrual syndrome, pelvic inflammatory disease, pelvic congestion (vascular engorgement), frigidity, anorgasmia, dyspareunia, ruptured fallopian tube, and Mittelschmerz.

[0672] Developmental and Inherited Disorders

[0673] Polynucleotides or polypeptides, or agonists or antagonists of the present invention may be used to treat, prevent, diagnose, and/or prognose diseases associated with mixed fetal tissues, including, but not limited to, developmental and inherited disorders or defects of the nervous system, musculoskeletal system, execretory system, cardiovascular system, hematopoietic system, gastrointestinal system, reproductive system, and respiratory system. Compositions of the present invention may also be used to treat, prevent, diagnose, and/or prognose developmental and inherited disorders or defects associated with, but not limited to, skin, hair, visual, and auditory tissues, metabolism. Additionally, the compositions of the invention may be useful in the diagnosis, treatment, and/or prevention of disorders or diseases associated with, but not limited to, chromosomal or genetic abnormalities and hyperproliferation or neoplasia.

[0674] Disorders or defects of the nervous system associated with developmental or inherited abnormalities that may be diagnosed, treated, and/or prevented with the compositions of the invention include, but are not limited to, adrenoleukodystrophy, agenesis of corpus callosum, Alexander disease, anencephaly, Angelman syndrome, Arnold-Chiari deformity, Batten disease, Canavan disease, cephalic disorders, Charcot-Marie-Tooth disease, encephalocele, Friedreich's ataxia, Gaucher's disease, Gorlin syndrome, Hallervorden-Spatz disease, hereditary spastic paraplegia, Huntington disease, hydranencephaly, hydrocephalus, Joubert syndrome, Lesch-Nyhan syndrome, leukodystrophy, Menkes disease, microcephaly, Niemann-Pick Type C1, neurofibromatosis, porencephaly, progeria, proteus syndrome, Refsum disease, spina bifida, Sturge-Weber syndrome, Tay-Sachs disease, tuberous sclerosis, and von Hippel-Lindau disease.

[0675] Developmental and inherited disorders resulting in disorders or defects of the musculoskeletal system that may be diagnosed, treated, and/or prevented with the compositions of the invention include, but are not limited to, achondroplasia, atlanto-occipital fusion, arthrogryposis mulitplex congenita, autosomal recessive muscular dystrophy, Becker's muscular dystrophy, cerebral palsy, choanal atresia, cleft lip, cleft palate, clubfoot, congenital amputation, congenital dislocation of the hip, congenital torticollis, congenital scoliosis, dopa-repsonsive dystonia, Duchenne muscular dystrophy, early-onset generalized dystonia, femoral torsion, Gorlin syndrome, hypophosphatasia, Klippel-Feil syndrome, knee dislocation, myoclonic dystonia, myotonic dystrophy, nail-patella syndrome, osteogenesis imperfecta, paroxysmal dystonia, progeria, prune-belly syndrome, rapid-onset dystonia parkinsonism, scolosis, syndactyly, Treacher Collins' syndrome, velocardiofacial syndrome, and X-linked dystonia-parkinsonism.

[0676] Developmental or hereditary disorders or defects of the excretory system that may be diagnosed, treated, and/or prevented with the compositions of the invention include, but are not limited to, Alport's syndrome, Bartter's syndrome, bladder diverticula, bladder exstrophy, cystinuria, epispadias, Fanconi's syndrome, Hartnup disease, horseshoe kidney, hypospadias, kidney agenesis, kidney ectopia, kidney malrotation, Liddle's syndrome, medullary cystic disease, medullary sponge, multicystic kidney, kidney polycystic kidney disease, nail-patella syndrome, Potter's syndrome, urinary tract flow obstruction, vitamin D-resistant rickets, and Wilm's tumor.

[0677] Cardiovascular disorders or defects of developmental or hereditary origin that may be diagnosed, treated, and/or prevented with the compositions of the invention include, but are not limited to, aortic valve stenosis, atrial septal defects, artioventricular (A-V) canal defect, bicuspid aortic valve, coarctation or the aorta, dextrocardia, Ebstein's anomaly, Eisenmenger's complex, hypoplastic left heart syndrome, Marfan syndrome, patent ductus arteriosus, progeria, pulmonary atresia, pulmonary valve stenosis, subaortic stenosis, tetralogy of fallot, total anomalous pulmonary venous (P-V) connection, transposition of the great arteries, tricuspid atresia, truncus arteriosus, ventricular septal defects. Developmental or inherited disorders resulting in disorders involving the hematopoietic system that may be diagnosed, treated, and/or prevented with the compositions of the invention include, but not limited to, Bernard-Soulier syndrome, Chediak-Higashi syndrome, hemophilia, Hermansky-Pudlak syndrome, sickle cell anemia, storage pool disease, thromboxane A2 dysfunction, thrombasthenia, and von Willebrand's disease.

[0678] The compositions of the invention may also be used to diagnose, treat, and/or prevent developmental and inherited disorders resulting in disorders or defects of the gastrointestinal system, including, but not limited to, anal atresia, biliary atresia, esophageal atresia, diaphragmatic hernia, Hirschsprung's disease, Meckel's diverticulum, oligohydramnios, omphalocele, polyhydramnios, porphyria, situs inversus viscera. Developmental or inherited disorders resulting in metabolic disorders that may be diagnosed, treated, and/or prevented with the compositions of the invention include, but are not limited to, alpha-1 antitrypsin deficiency, cystic fibrosis, hemochromatosis, lysosomal storage disease, phenylketonuria, Wilson's disease, and Zellweger syndrome.

[0679] Disorders of the reproductive system that are developmentally or hereditary related that may also be diagnosed, treated, and/or prevented with the compositions of the invention include, but are not limited to, androgen insensitivity syndrome, ambiguous genitalia, autosomal sex reversal, congenital adreneal hyperplasia, gonadoblastoma, ovarian germ cell cancer, pseudohermphroditism, true hermaphroditism, undescended testis, XX male syndrome, and XY female type gonadal dysgenesis. The compositions of the invention may also be used to diagnose, treat, and/or prevent developmental or inherited respiratory defects including, but not limited to, askin tumor, azygos lobe, congenital diaphragmatic hernia, congenital lobar emphysema, cystic adenomatoid malformation, lobar emphysema, hyaline membrane disease, and pectus excavatum.

[0680] Developmental or inherited disorders may also result from chromosomal or genetic aberration that may be diagnosed, treated, and/or prevented with the compositions of the invention including, but not limited to, 4p-syndrome, cri du chat syndrome, Digeorge syndrome, Down's syndrome, Edward's syndrome, fragile X syndrome, Klinefelter's syndrome, Patau's syndrome, Prader-Willi syndrome, progeria, Turner's syndrome, triple X syndrome, and XYY syndrome. Other developmental disorders that can be diagnosed, treated, and/or prevented with the compositions of the invention, include, but are not limited to, fetal alcohol syndrome, and can be caused by environmental factors surrounding the developing fetus.

[0681] The compositions of the invention may further be able to be used to diagnose, treat, and/or prevent errors in development or a genetic disposition that may result in hyperproliferative disorders or neoplasms, including, but not limited to, acute childhood lymphoblastic leukemia, askin tumor, Beckwith-Wiedemann syndrome, childhood acute myeloid leukemia, childhood brain stem glioma, childhood cerebellar astrocytoma, childhood extracranial germ cell tumors childhood (primary), gonadoblastoma, hepatocellular cancer, childhood Hodgkin's disease, childhood Hodgkin's lymphoma, childhood hypothalamic and visual pathway glioma, childhood (primary) liver cancer, childhood lymphoblastic leukemia, childhood medulloblastoma, childhood non-Hodgkin's lymphoma, childhood pineal and supratentorial primitive neuroectodermal tumors, childhood primary liver cancer, childhood rhabdomyosarcoma, childhood soft tissue sarcoma, Gorlin syndrome, familial multiple endrocrine neoplasia type I, neuroblastoma, ovarian germ cell cancer, pheochromocytoma, retinoblastoma, and Wilm's tumor.

[0682] Polypeptides may be administered using any method known in the art, including, but not limited to, direct needle injection at the delivery site, intravenous injection, topical administration, catheter infusion, biolistic injectors, particle accelerators, gelfoam sponge depots, other commercially available depot materials, osmotic pumps, oral or suppositorial solid pharmaceutical formulations, decanting or topical applications during surgery, aerosol delivery. Such methods are known in the art. Polypeptides may be administered as part of a Therapeutic, described in more detail below. Methods of delivering polynucleotides are described in more detail herein.

[0683] Diseases at the Cellular Level

[0684] Diseases associated with increased cell survival or the inhibition of apoptosis that could be treated, prevented, diagnosed and/or prognosed using polynucleotides or polypeptides, as well as antagonists or agonists of the present invention, include cancers (such as follicular lymphomas, carcinomas with p53 mutations, and hormone-dependent tumors, including, but not limited to colon cancer, cardiac tumors, pancreatic cancer, melanoma, retinoblastoma, glioblastoma, lung cancer, intestinal cancer, testicular cancer, stomach cancer, neuroblastoma, myxoma, myoma, lymphoma, endothelioma, osteoblastoma, osteoclastoma, osteosarcoma, chondrosarcoma, adenoma, breast cancer, prostate cancer, Kaposi's sarcoma and ovarian cancer); autoimmune disorders (such as, multiple sclerosis, Sjogren's syndrome, Hashimoto's thyroiditis, biliary cirrhosis, Behcet's disease, Crohn's disease, polymyositis, systemic lupus erythematosus and immune-related glomerulonephritis and rheumatoid arthritis) and viral infections (such as herpes viruses, pox viruses and adenoviruses), inflammation, graft v. host disease, acute graft rejection, and chronic graft rejection.

[0685] In preferred embodiments, polynucleotides, polypeptides, and/or antagonists of the invention are used to inhibit growth, progression, and/or metastasis of cancers, in particular those [listed above] involving pancreatic tissues.

[0686] Additional diseases or conditions associated with increased cell survival that could be treated or detected by polynucleotides or polypeptides, or agonists or antagonists of the present invention include, but are not limited to, progression, and/or metastases of malignancies and related disorders such as leukemia (including acute leukemias (e.g., acute lymphocytic leukemia, acute myelocytic leukemia (including myeloblastic, promyelocytic, myelomonocytic, monocytic, and erythroleukemia)) and chronic leukemias (e.g., chronic myelocytic (granulocytic) leukemia and chronic lymphocytic leukemia)), polycythemia vera, lymphomas (e.g., Hodgkin's disease and non-Hodgkin's disease), multiple myeloma, Waldenstrom's macroglobulinemia, heavy chain disease, and solid tumors including, but not limited to, sarcomas and carcinomas such as fibrosarcoma, myxosarcoma, liposarcoma, chondrosarcoma, osteogenic sarcoma, chordoma, angiosarcoma, endotheliosarcoma, lymphangiosarcoma, lymphangioendotheliosarcoma, synovioma, mesothelioma, Ewing's tumor, leiomyosarcoma, rhabdomyosarcoma, colon carcinoma, pancreatic cancer, breast cancer, ovarian cancer, prostate cancer, squamous cell carcinoma, basal cell carcinoma, adenocarcinoma, sweat gland carcinoma, sebaceous gland carcinoma, papillary carcinoma, papillary adenocarcinomas, cystadenocarcinoma, medullary carcinoma, bronchogenic carcinoma, renal cell carcinoma, hepatoma, bile duct carcinoma, choriocarcinoma, seminoma, embryonal carcinoma, Wilm's tumor, cervical cancer, testicular tumor, lung carcinoma, small cell lung carcinoma, bladder carcinoma, epithelial carcinoma, glioma, astrocytoma, medulloblastoma, craniopharyngioma, ependymoma, pinealoma, hemangioblastoma, acoustic neuroma, oligodendroglioma, menangioma, melanoma, neuroblastoma, and retinoblastoma.

[0687] Diseases associated with increased apoptosis that could be treated, prevented, diagnosted, and/or prognosed using polynucleotides or polypeptides, as well as agonists or antagonists of the present invention, include, but are not limited to, AIDS; neurodegenerative disorders (such as Alzheimer's disease, Parkinson's disease, Amyotrophic lateral sclerosis, Retinitis pigmentosa, Cerebellar degeneration and brain tumor or prior associated disease); autoimmune disorders (such as, multiple sclerosis, Sjogren's syndrome, Hashimoto's thyroiditis, biliary cirrhosis, Behcet's disease, Crohn's disease, polymyositis, systemic lupus erythematosus and immune-related glomerulonephritis and rheumatoid arthritis) myelodysplastic syndromes (such as aplastic anemia), graft v. host disease, ischemic injury (such as that caused by myocardial infarction, stroke and reperfusion injury), liver injury (e.g., hepatitis related liver injury, ischemia/reperfusion injury, cholestosis (bile duct injury) and liver cancer); toxin-induced liver disease (such as that caused by alcohol), septic shock, cachexia and anorexia.

[0688] Wound Healing and Epithelial Cell Proliferation

[0689] In accordance with yet a further aspect of the present invention, there is provided a process for utilizing polynucleotides or polypeptides, as well as agonists or antagonists of the present invention, for therapeutic purposes, for example, to stimulate epithelial cell proliferation and basal keratinocytes for the purpose of wound healing, and to stimulate hair follicle production and healing of dermal wounds. Polynucleotides or polypeptides, as well as agonists or antagonists of the present invention, may be clinically useful in stimulating wound healing including surgical wounds, excisional wounds, deep wounds involving damage of the dermis and epidermis, eye tissue wounds, dental tissue wounds, oral cavity wounds, diabetic ulcers, dermal ulcers, cubitus ulcers, arterial ulcers, venous stasis ulcers, burns resulting from heat exposure or chemicals, and other abnormal wound healing conditions such as uremia, malnutrition, vitamin deficiencies and complications associated with systemic treatment with steroids, radiation therapy and antineoplastic drugs and antimetabolites. Polynucleotides or polypeptides, as well as agonists or antagonists of the present invention, could be used to promote dermal reestablishment subsequent to dermal loss.

[0690] Polynucleotides or polypeptides, as well as agonists or antagonists of the present invention, could be used to increase the adherence of skin grafts to a wound bed and to stimulate re-epithelialization from the wound bed. The following are types of grafts that polynucleotides or polypeptides, agonists or antagonists of the present invention, could be used to increase adherence to a wound bed: autografts, artificial skin, allografts, autodermic graft, autoepdermic grafts, avacular grafts, Blair-Brown grafts, bone graft, brephoplastic grafts, cutis graft, delayed graft, dermic graft, epidermic graft, fascia graft, full thickness graft, heterologous graft, xenograft, homologous graft, hyperplastic graft, lamellar graft, mesh graft, mucosal graft, Ollier-Thiersch graft, omenpal graft, patch graft, pedicle graft, penetrating graft, split skin graft, thick split graft. Polynucleotides or polypeptides, as well as agonists or antagonists of the present invention, can be used to promote skin strength and to improve the appearance of aged skin.

[0691] It is believed that polynucleotides or polypeptides, as well as agonists or antagonists of the present invention, will also produce changes in hepatocyte proliferation, and epithelial cell proliferation in the lung, breast, pancreas, stomach, small intestine, and large intestine. Polynucleotides or polypeptides, as well as agonists or antagonists of the present invention, could promote proliferation of epithelial cells such as sebocytes, hair follicles, hepatocytes, type II pneumocytes, mucin-producing goblet cells, and other epithelial cells and their progenitors contained within the skin, lung, liver, and gastrointestinal tract. Polynucleotides or polypeptides, agonists or antagonists of the present invention, may promote proliferation of endothelial cells, keratinocytes, and basal keratinocytes.

[0692] Polynucleotides or polypeptides, as well as agonists or antagonists of the present invention, could also be used to reduce the side effects of gut toxicity that result from radiation, chemotherapy treatments or viral infections. Polynucleotides or polypeptides, as well as agonists or antagonists of the present invention, may have a cytoprotective effect on the small intestine mucosa. Polynucleotides or polypeptides, as well as agonists or antagonists of the present invention, may also stimulate healing of mucositis (mouth ulcers) that result from chemotherapy and viral infections.

[0693] Polynucleotides or polypeptides, as well as agonists or antagonists of the present invention, could further be used in full regeneration of skin in full and partial thickness skin defects, including burns, (i.e., repopulation of hair follicles, sweat glands, and sebaceous glands), treatment of other skin defects such as psoriasis. Polynucleotides or polypeptides, as well as agonists or antagonists of the present invention, could be used to treat epidermolysis bullosa, a defect in adherence of the epidermis to the underlying dermis which results in frequent, open and painful blisters by accelerating reepithelialization of these lesions. Polynucleotides or polypeptides, as well as agonists or antagonists of the present invention, could also be used to treat gastric and doudenal ulcers and help heal by scar formation of the mucosal lining and regeneration of glandular mucosa and duodenal mucosal lining more rapidly. Inflammatory bowel diseases, such as Crohn's disease and ulcerative colitis, are diseases, which result in destruction of the mucosal surface of the small or large intestine, respectively. Thus, polynucleotides or polypeptides, as well as agonists or antagonists of the present invention, could be used to promote the resurfacing of the mucosal surface to aid more rapid healing and to prevent progression of inflammatory bowel disease. Treatment with polynucleotides or polypeptides, agonists or antagonists of the present invention, is expected to have a significant effect on the production of mucus throughout the gastrointestinal tract and could be used to protect the intestinal mucosa from injurious substances that are ingested or following surgery. Polynucleotides or polypeptides, as well as agonists or antagonists of the present invention, could be used to treat diseases associate with the under expression.

[0694] Moreover, polynucleotides or polypeptides, as well as agonists or antagonists of the present invention, could be used to prevent and heal damage to the lungs due to various pathological states. Polynucleotides or polypeptides, as well as agonists or antagonists of the present invention, could stimulate proliferation and differentiation and promote the repair of alveoli and brochiolar epithelium to prevent or treat acute or chronic lung damage. For example, emphysema, which results in the progressive loss of aveoli, and inhalation injuries, i.e., resulting from smoke inhalation and burns, that cause necrosis of the bronchiolar epithelium and alveoli could be effectively treated using polynucleotides or polypeptides, agonists or antagonists of the present invention. Also, polynucleotides or polypeptides, as well as agonists or antagonists of the present invention, could be used to stimulate the proliferation of and differentiation of type II pneumocytes, which may help treat or prevent disease such as hyaline membrane diseases, such as infant respiratory distress syndrome and bronchopulmonary displasia, in premature infants.

[0695] Polynucleotides or polypeptides, as well as agonists or antagonists of the present invention, could stimulate the proliferation and differentiation of hepatocytes and, thus, could be used to alleviate or treat liver diseases and pathologies such as fulminant liver failure caused by cirrhosis, liver damage caused by viral hepatitis and toxic substances (i.e., acetaminophen, carbon tetraholoride and other hepatotoxins known in the art).

[0696] In addition, polynucleotides or polypeptides, as well as agonists or antagonists of the present invention, could be used treat or prevent the onset of diabetes mellitus. In patients with newly diagnosed Types I and II diabetes, where some islet cell function remains, polynucleotides or polypeptides, as well as agonists or antagonists of the present invention, could be used to maintain the islet function so as to alleviate, delay or prevent permanent manifestation of the disease. Also, polynucleotides or polypeptides, as well as agonists or antagonists of the present invention, could be used as an auxiliary in islet cell transplantation to improve or promote islet cell function.

[0697] Infectious Disease

[0698] Polynucleotides or polypeptides, as well as agonists or antagonists of the present invention can be used to treat or detect infectious agents. For example, by increasing the immune response, particularly increasing the proliferation and differentiation of B and/or T cells, infectious diseases may be treated. The immune response may be increased by either enhancing an existing immune response, or by initiating a new immune response. Alternatively, polynucleotides or polypeptides, as well as agonists or antagonists of the present invention may also directly inhibit the infectious agent, without necessarily eliciting an immune response.

[0699] Viruses are one example of an infectious agent that can cause disease or symptoms that can be treated or detected by a polynucleotide or polypeptide and/or agonist or antagonist of the present invention. Examples of viruses, include, but are not limited to Examples of viruses, include, but are not limited to the following DNA and RNA viruses and viral families: Arbovirus, Adenoviridae, Arenaviridae, Arterivirus, Bimaviridae, Bunyaviridae, Caliciviridae, Circoviridae, Coronaviridae, Dengue, EBV, HIV, Flaviviridae, Hepadnaviridae (Hepatitis), Herpesviridae (such as, Cytomegalovirus, Herpes Simplex, Herpes Zoster), Mononegavirus (e.g., Paramyxoviridae, Morbillivirus, Rhabdoviridae), Orthomyxoviridae (e.g., Influenza A, Influenza B, and parainfluenza), Papiloma virus, Papovaviridae, Parvoviridae, Picornaviridae, Poxviridae (such as Smallpox or Vaccinia), Reoviridae (e.g., Rotavirus), Retroviridae (HTLV-I, HTLV-II, Lentivirus), and Togaviridae (e.g., Rubivirus). Viruses falling within these families can cause a variety of diseases or symptoms, including, but not limited to: arthritis, bronchiollitis, respiratory syncytial virus, encephalitis, eye infections (e.g., conjunctivitis, keratitis), chronic fatigue syndrome, hepatitis (A, B, C, E, Chronic Active, Delta), Japanese B encephalitis, Junin, Chikungunya, Rift Valley fever, yellow fever, meningitis, opportunistic infections (e.g., AIDS), pneumonia, Burkitt's Lymphoma, chickenpox, hemorrhagic fever, Measles, Mumps, Parainfluenza, Rabies, the common cold, Polio, leukemia, Rubella, sexually transmitted diseases, skin diseases (e.g., Kaposi's, warts), and viremia, polynucleotides or polypeptides, or agonists or antagonists of the invention, can be used to treat or detect any of these symptoms or diseases. In specific embodiments, polynucleotides, polypeptides, or agonists or antagonists of the invention are used to treat: meningitis, Dengue, EBV, and/or hepatitis (e.g., hepatitis B). In an additional specific embodiment polynucleotides, polypeptides, or agonists or antagonists of the invention are used to treat patients nonresponsive to one or more other commercially available hepatitis vaccines. In a further specific embodiment polynucleotides, polypeptides, or agonists or antagonists of the invention are used to treat AIDS.

[0700] Similarly, bacterial or fungal agents that can cause disease or symptoms and that can be treated or detected by a polynucleotide or polypeptide and/or agonist or antagonist of the present invention include, but are not limited to, the following Gram-Negative and Gram-positive bacteria, bacterial families, and fungi: Actinomyces (e.g., Norcardia), Acinetobacter, Cryptococcus neoformans, Aspergillus, Bacillaceae (e.g., Bacillus anthrasis), Bacteroides (e.g., Bacteroides fragilis), Blastomycosis, Bordetella, Borrelia (e.g., Borrelia burgdorferi), Brucella, Candidia, Campylobacter, Chlamydia, Clostridium (e.g., Clostridium botulinum, Clostridium dificile, Clostridium perfringens, Clostridium tetani), Coccidioides, Corynebacterium (e.g., Corynebacterium diptheriae), Cryptococcus, Dermatocycoses, E. coli (e.g., Enterotoxigenic E. coli and Enterohemorrhagic E. coli), Enterobacter (e.g. Enterobacter aerogenes), Enterobacteriaceae (Klebsiella, Salmonella (e.g., Salmonella typhi, Salmonella enteritidis, Salmonella paratyphi), Serratia, Yersinia, Shigella), Erysipelothrix, Haemophilus (e.g., Haemophilus influenza type B), Helicobacter, Legionella (e.g., Legionella pneumophila), Leptospira, Listeria (e.g., Listeria monocytogenes), Mycoplasma, Mycobacterium (e.g., Mycobacterium leprae and Mycobacterium tuberculosis), Vibrio (e.g., Vibrio cholerae), Neisseriaceae (e.g., Neisseria gonorrhea, Neisseria meningitidis), Pasteurellacea, Proteus, Pseudomonas (e.g., Pseudomonas aeruginosa), Rickettsiaceae, Spirochetes (e.g., Treponema spp., Leptospira spp., Borrelia spp.) Shigella spp., Staphylococcus (e.g., Staphylococcus aureus), Meningiococcus, Pneumococcus and Streptococcus (e.g., Streptococcus pneumoniae and Groups A, B, and C Streptococci), and Ureaplasmas. These bacterial, parasitic, and fungal families can cause diseases or symptoms, including, but not limited to: antibiotic-resistant infections, bacteremia, endocarditis, septicemia, eye infections (conjunctivitis) tuberculosis, uveitis, gingivitis, bacterial diarrhea, opportunistic infections (e.g., AIDS related infections), paronychia, prosthesis-related infections, dental caries, Reiter's Disease, respiratory tract infections (e.g., Whooping Cough or Empyema), sepsis, Lyme Disease, Cat-Scratch Disease, dysentery, paratyphoid fever, food poisoning, Legionella disease, chronic and acute inflammation, erythema, yeast infections, typhoid, pneumonia, gonorrhea, meningitis (e.g., meningitis types A and B), chlamydia, syphilis, diphtheria, leprosy, burcellosis, peptic ulcers, anthrax, spontaneous abortion, birth defects, lung infections, ear infections, deafness, blindness, lethargy, malaise, vomiting, chronic diarrhea, Crohn's disease, colitis, vaginosis, sterility, pelvic inflammatory disease, candidiasis, paratuberculosis, tuberculosis, lupus, botulism, gangrene, tetanus, impetigo, Rheumatic Fever, Scarlet Fever, sexually transmitted diseases, skin diseases (e.g., cellulitis, dermatocycoses), toxemia, urinary tract infections, wound infections or noscomial infections. Polynucleotides or polypeptides, agonists or antagonists of the invention, can be used to treat or detect any of these symptoms or diseases. In specific embodiments, polynucleotides, polypeptides, agonists or antagonists of the invention are used to treat: tetanus, diptheria, botulism, and/or meningitis type B.

[0701] Moreover, parasitic agents causing disease or symptoms that can be treated or detected by a polynucleotide or polypeptide and/or agonist or antagonist of the present invention include, but not limited to, the following families or class: Amebiasis, Babesiosis, Coccidiosis, Cryptosporidiosis, Dientamoebiasis, Dourine, Ectoparasitic, Giardiasis, Helminthiasis, Leishmaniasis, Theileriasis, Toxoplasmosis, Trypanosomiasis, and Trichomonas and Sporozoans (e.g., Plasmodium virax, Plasmodium falciparium, Plasmodium malariae and Plasmodium ovale). These parasites can cause a variety of diseases or symptoms, including, but not limited to: Scabies, Trombiculiasis, eye infections, intestinal disease (e.g., dysentery, giardiasis), liver disease, lung disease, opportunistic infections (e.g., AIDS related), malaria, pregnancy complications, and toxoplasmosis. polynucleotides or polypeptides, or agonists or antagonists of the invention, can be used to treat or detect any of these symptoms or diseases.

[0702] Polynucleotides or polypeptides, as well as agonists or antagonists of the present invention of the present invention could either be by administering an effective amount of a polypeptide to the patient, or by removing cells from the patient, supplying the cells with a polynucleotide of the present invention, and returning the engineered cells to the patient (ex vivo therapy). Moreover, the polypeptide or polynucleotide of the present invention can be used as an antigen in a vaccine to raise an immune response against infectious disease.

[0703] Regeneration

[0704] Polynucleotides or polypeptides, as well as agonists or antagonists of the present invention can be used to differentiate, proliferate, and attract cells, leading to the regeneration of tissues. (See, Science 276:59-87 (1997).) The regeneration of tissues could be used to repair, replace, or protect tissue damaged by congenital defects, trauma (wounds, burns, incisions, or ulcers), age, disease (e.g. osteoporosis, osteocarthritis, periodontal disease, liver failure), surgery, including cosmetic plastic surgery, fibrosis, reperfusion injury, or systemic cytokine damage.

[0705] Tissues that could be regenerated using the present invention include organs (e.g., pancreas, liver, intestine, kidney, skin, endothelium), muscle (smooth, skeletal or cardiac), vasculature (including vascular and lymphatics), nervous, hematopoietic, and skeletal (bone, cartilage, tendon, and ligament) tissue. Preferably, regeneration occurs without or decreased scarring. Regeneration also may include angiogenesis.

[0706] Moreover, polynucleotides or polypeptides, as well as agonists or antagonists of the present invention, may increase regeneration of tissues difficult to heal. For example, increased tendon/ligament regeneration would quicken recovery time after damage. Polynucleotides or polypeptides, as well as agonists or antagonists of the present invention could also be used prophylactically in an effort to avoid damage. Specific diseases that could be treated include of tendinitis, carpal tunnel syndrome, and other tendon or ligament defects. A further example of tissue regeneration of non-healing wounds includes pressure ulcers, ulcers associated with vascular insufficiency, surgical, and traumatic wounds.

[0707] Similarly, nerve and brain tissue could also be regenerated by using polynucleotides or polypeptides, as well as agonists or antagonists of the present invention, to proliferate and differentiate nerve cells. Diseases that could be treated using this method include central and peripheral nervous system diseases, neuropathies, or mechanical and traumatic disorders (e.g., spinal cord disorders, head trauma, cerebrovascular disease, and stoke). Specifically, diseases associated with peripheral nerve injuries, peripheral neuropathy (e.g., resulting from chemotherapy or other medical therapies), localized neuropathies, and central nervous system diseases (e.g., Alzheimer's disease, Parkinson's disease, Huntington's disease, amyotrophic lateral sclerosis, and Shy-Drager syndrome), could all be treated using the polynucleotides or polypeptides, as well as agonists or antagonists of the present invention.

[0708] Chemotaxis

[0709] Polynucleotides or polypeptides, as well as agonists or antagonists of the present invention may have chemotaxis activity. A chemotaxic molecule attracts or mobilizes cells (e.g., monocytes, fibroblasts, neutrophils, T-cells, mast cells, eosinophils, epithelial and/or endothelial cells) to a particular site in the body, such as inflammation, infection, or site of hyperproliferation. The mobilized cells can then fight off and/or heal the particular trauma or abnormality.

[0710] Polynucleotides or polypeptides, as well as agonists or antagonists of the present invention may increase chemotaxic activity of particular cells. These chemotactic molecules can then be used to treat inflammation, infection, hyperproliferative disorders, or any immune system disorder by increasing the number of cells targeted to a particular location in the body. For example, chemotaxic molecules can be used to treat wounds and other trauma to tissues by attracting immune cells to the injured location. Chemotactic molecules of the present invention can also attract fibroblasts, which can be used to treat wounds.

[0711] It is also contemplated that polynucleotides or polypeptides, as well as agonists or antagonists of the present invention may inhibit chemotactic activity. These molecules could also be used to treat disorders. Thus, polynucleotides or polypeptides, as well as agonists or antagonists of the present invention could be used as an inhibitor of chemotaxis.

[0712] Binding Activity

[0713] A polypeptide of the present invention may be used to screen for molecules that bind to the polypeptide or for molecules to which the polypeptide binds. The binding of the polypeptide and the molecule may activate (agonist), increase, inhibit (antagonist), or decrease activity of the polypeptide or the molecule bound. Examples of such molecules include antibodies, oligonucleotides, proteins (e.g., receptors),or small molecules.

[0714] Preferably, the molecule is closely related to the natural ligand of the polypeptide, e.g., a fragment of the ligand, or a natural substrate, a ligand, a structural or functional mimetic. (See, Coligan et al., Current Protocols in Immunology 1(2):Chapter 5 (1991).) Similarly, the molecule can be closely related to the natural receptor to which the polypeptide binds, or at least, a fragment of the receptor capable of being bound by the polypeptide (e.g., active site). In either case, the molecule can be rationally designed using known techniques.

[0715] Preferably, the screening for these molecules involves producing appropriate cells, which express the polypeptide. Preferred cells include cells from mammals, yeast, Drosophila, or E. coli. Cells expressing the polypeptide (or cell membrane containing the expressed polypeptide) are then preferably contacted with a test compound potentially containing the molecule to observe binding, stimulation, or inhibition of activity of either the polypeptide or the molecule.

[0716] The assay may simply test binding of a candidate compound to the polypeptide, wherein binding is detected by a label, or in an assay involving competition with a labeled competitor. Further, the assay may test whether the candidate compound results in a signal generated by binding to the polypeptide.

[0717] Alternatively, the assay can be carried out using cell-free preparations, polypeptide/molecule affixed to a solid support, chemical libraries, or natural product mixtures. The assay may also simply comprise the steps of mixing a candidate compound with a solution containing a polypeptide, measuring polypeptide/molecule activity or binding, and comparing the polypeptide/molecule activity or binding to a standard.

[0718] Preferably, an ELISA assay can measure polypeptide level or activity in a sample (e.g., biological sample) using a monoclonal or polyclonal antibody. The antibody can measure polypeptide level or activity by either binding, directly or indirectly, to the polypeptide or by competing with the polypeptide for a substrate.

[0719] Additionally, the receptor to which the polypeptide of the present invention binds can be identified by numerous methods known to those of skill in the art, for example, ligand panning and FACS sorting (Coligan, et al., Current Protocols in Immun., 1(2), Chapter 5, (1991)). For example, expression cloning is employed wherein polyadenylated RNA is prepared from a cell responsive to the polypeptides, for example, NIH3T3 cells which are known to contain multiple receptors for the FGF family proteins, and SC-3 cells, and a cDNA library created from this RNA is divided into pools and used to transfect COS cells or other cells that are not responsive to the polypeptides. Transfected cells which are grown on glass slides are exposed to the polypeptide of the present invention, after they have been labeled. The polypeptides can be labeled by a variety of means including iodination or inclusion of a recognition site for a site-specific protein kinase.

[0720] Following fixation and incubation, the slides are subjected to auto-radiographic analysis. Positive pools are identified and sub-pools are prepared and re-transfected using an iterative sub-pooling and re-screening process, eventually yielding a single clones that encodes the putative receptor.

[0721] As an alternative approach for receptor identification, the labeled polypeptides can be photoaffinity linked with cell membrane or extract preparations that express the receptor molecule. Cross-linked material is resolved by PAGE analysis and exposed to X-ray film. The labeled complex containing the receptors of the polypeptides can be excised, resolved into peptide fragments, and subjected to protein microsequencing. The amino acid sequence obtained from microsequencing would be used to design a set of degenerate oligonucleotide probes to screen a cDNA library to identify the genes encoding the putative receptors.

[0722] Moreover, the techniques of gene-shuffling, motif-shuffling, exon-shuffling, and/or codon-shuffling (collectively referred to as “DNA shuffling”) may be employed to modulate the activities of the polypeptide of the present invention thereby effectively generating agonists and antagonists of the polypeptide of the present invention. See generally, U.S. Pat. Nos. 5,605,793, 5,811,238, 5,830,721, 5,834,252, and 5,837,458, and Patten, P. A., et al., Curr. Opinion Biotechnol. 8:724-33 (1997); Harayama, S. Trends Biotechnol. 16(2):76-82 (1998); Hansson L. O., et al., J. Mol. Biol. 287:265-76 (1999); and Lorenzo, M. M. and Blasco, R. Biotechniques 24(2):308-13 (1998); each of these patents and publications are hereby incorporated by reference). In one embodiment, alteration of polynucleotides and corresponding polypeptides may be achieved by DNA shuffling. DNA shuffling involves the assembly of two or more DNA segments into a desired molecule by homologous, or site-specific, recombination. In another embodiment, polynucleotides and corresponding polypeptides may be altered by being subjected to random mutagenesis by error-prone PCR, random nucleotide insertion or other methods prior to recombination. In another embodiment, one or more components, motifs, sections, parts, domains, fragments, etc., of the polypeptide of the present invention may be recombined with one or more components, motifs, sections, parts, domains, fragments, etc. of one or more heterologous molecules. In preferred embodiments, the heterologous molecules are family members. In further preferred embodiments, the heterologous molecule is a growth factor such as, for example, platelet-derived growth factor (PDGF), insulin-like growth factor (IGF-I), transforming growth factor (TGF)-alpha, epidermal growth factor (EGF), fibroblast growth factor (FGF), TGF-beta, bone morphogenetic protein (BMP)-2, BMP-4, BMP-5, BMP-6, BMP-7, activins A and B, decapentaplegic (dpp), 60A, OP-2, dorsalin, growth differentiation factors (GDFs), nodal, MIS, inhibin-alpha, TGF-beta1, TGF-beta2, TGF-beta3, TGF-beta5, and glial-derived neurotrophic factor (GDNF).

[0723] Other preferred fragments are biologically active fragments of the polypeptide of the present invention. Biologically active fragments are those exhibiting activity similar, but not necessarily identical, to an activity of the polypeptide of the present invention. The biological activity of the fragments may include an improved desired activity, or a decreased undesirable activity.

[0724] Additionally, this invention provides a method of screening compounds to identify those, which modulate the action of the polypeptide of the present invention. An example of such an assay comprises combining a mammalian fibroblast cell, the polypeptide of the present invention, the compound to be screened and ³[H] thymidine under cell culture conditions where the fibroblast cell would normally proliferate. A control assay may be performed in the absence of the compound to be screened and compared to the amount of fibroblast proliferation in the presence of the compound to determine if the compound stimulates proliferation by determining the uptake of 3[H] thymidine in each case. The amount of fibroblast cell proliferation is measured by liquid scintillation chromatography, which measures the incorporation of ³[H] thymidine. Both agonist and antagonist compounds may be identified by this procedure.

[0725] In another method, a mammalian cell or membrane preparation expressing a receptor for a polypeptide of the present invention is incubated with a labeled polypeptide of the present invention in the presence of the compound. The ability of the compound to enhance or block this interaction could then be measured. Alternatively, the response of a known second messenger system following interaction of a compound to be screened and the receptor is measured and the ability of the compound to bind to the receptor and elicit a second messenger response is measured to determine if the compound is a potential agonist or antagonist. Such second messenger systems include but are not limited to, cAMP guanylate cyclase, ion channels or phosphoinositide hydrolysis.

[0726] All of these above assays can be used as diagnostic or prognostic markers. The molecules discovered using these assays can be used to treat disease or to bring about a particular result in a patient (e.g., blood vessel growth) by activating or inhibiting the polypeptide/molecule. Moreover, the assays can discover agents which may inhibit or enhance the production of the polypeptides of the invention from suitably manipulated cells or tissues.

[0727] Therefore, the invention includes a method of identifying compounds which bind to a polypeptide of the invention comprising the steps of: (a) incubating a candidate binding compound with a polypeptide of the present invention; and (b) determining if binding has occurred. Moreover, the invention includes a method of identifying agonists/antagonists comprising the steps of: (a) incubating a candidate compound with a polypeptide of the present invention, (b) assaying a biological activity, and (b) determining if a biological activity of the polypeptide has been altered.

[0728] Targeted Delivery

[0729] In another embodiment, the invention provides a method of delivering compositions to targeted cells expressing a receptor for a polypeptide of the invention, or cells expressing a cell bound form of a polypeptide of the invention.

[0730] As discussed herein, polypeptides or antibodies of the invention may be associated with heterologous polypeptides, heterologous nucleic acids, toxins, or prodrugs via hydrophobic, hydrophilic, ionic and/or covalent interactions. In one embodiment, the invention provides a method for the specific delivery of compositions of the invention to cells by administering polypeptides of the invention (including antibodies) that are associated with heterologous polypeptides or nucleic acids. In one example, the invention provides a method for delivering a therapeutic protein into the targeted cell. In another example, the invention provides a method for delivering a single stranded nucleic acid (e.g., antisense or ribozymes) or double stranded nucleic acid (e.g., DNA that can integrate into the cell's genome or replicate episomally and that can be transcribed) into the targeted cell.

[0731] In another embodiment, the invention provides a method for the specific destruction of cells (e.g., the destruction of tumor cells) by administering polypeptides of the invention (e.g., polypeptides of the invention or antibodies of the invention) in association with toxins or cytotoxic prodrugs.

[0732] By “toxin” is meant compounds that bind and activate endogenous cytotoxic effector systems, radioisotopes, holotoxins, modified toxins, catalytic subunits of toxins, or any molecules or enzymes not normally present in or on the surface of a cell that under defined conditions cause the cell's death. Toxins that may be used according to the methods of the invention include, but are not limited to, radioisotopes known in the art, compounds such as, for example, antibodies (or complement fixing containing portions thereof) that bind an inherent or induced endogenous cytotoxic effector system, thymidine kinase, endonuclease, RNAse, alpha toxin, ricin, abrin, Pseudomonas exotoxin A, diphtheria toxin, saporin, momordin, gelonin, pokeweed antiviral protein, alpha-sarcin and cholera toxin. By “cytotoxic prodrug” is meant a non-toxic compound that is converted by an enzyme, normally present in the cell, into a cytotoxic compound. Cytotoxic prodrugs that may be used according to the methods of the invention include, but are not limited to, glutamyl derivatives of benzoic acid mustard alkylating agent, phosphate derivatives of etoposide or mitomycin C, cytosine arabinoside, daunorubisin, and phenoxyacetamide derivatives of doxorubicin.

[0733] Drug Screening

[0734] Further contemplated is the use of the polypeptides of the present invention, or the polynucleotides encoding these polypeptides, to screen for molecules, which modify the activities of the polypeptides of the present invention. Such a method would include contacting the polypeptide of the present invention with a selected compound(s) suspected of having antagonist or agonist activity, and assaying the activity of these polypeptides following binding.

[0735] This invention is particularly useful for screening therapeutic compounds by using the polypeptides of the present invention, or binding fragments thereof, in any of a variety of drug screening techniques. The polypeptide or fragment employed in such a test may be affixed to a solid support, expressed on a cell surface, free in solution, or located intracellularly. One method of drug screening utilizes eukaryotic or prokaryotic host cells which are stably transformed with recombinant nucleic acids expressing the polypeptide or fragment. Drugs are screened against such transformed cells in competitive binding assays. One may measure, for example, the formulation of complexes between the agent being tested and a polypeptide of the present invention.

[0736] Thus, the present invention provides methods of screening for drugs or any other agents, which affect activities mediated by the polypeptides of the present invention. These methods comprise contacting such an agent with a polypeptide of the present invention or a fragment thereof and assaying for the presence of a complex between the agent and the polypeptide or a fragment thereof, by methods well known in the art. In such a competitive binding assay, the agents to screen are typically labeled. Following incubation, free agent is separated from that present in bound form, and the amount of free or uncomplexed label is a measure of the ability of a particular agent to bind to the polypeptides of the present invention.

[0737] Another technique for drug screening provides high throughput screening for compounds having suitable binding affinity to the polypeptides of the present invention, and is described in great detail in European Patent Application 84/03564, published on Sep. 13, 1984, which is incorporated herein by reference herein. Briefly stated, large numbers of different small peptide test compounds are synthesized on a solid substrate, such as plastic pins or some other surface. The peptide test compounds are reacted with polypeptides of the present invention and washed. Bound polypeptides are then detected by methods well known in the art. Purified polypeptides are coated directly onto plates for use in the aforementioned drug screening techniques. In addition, non-neutralizing antibodies may be used to capture the peptide and immobilize it on the solid support.

[0738] This invention also contemplates the use of competitive drug screening assays in which neutralizing antibodies capable of binding polypeptides of the present invention specifically compete with a test compound for binding to the polypeptides or fragments thereof. In this manner, the antibodies are used to detect the presence of any peptide which shares one or more antigenic epitopes with a polypeptide of the invention.

[0739] Antisense And Ribozyme (Antagonists)

[0740] In specific embodiments, antagonists according to the present invention are nucleic acids corresponding to the sequences contained in SEQ ID NO:X, or the complementary strand thereof, and/or to cDNA sequences contained in cDNA Clone ID NO:Z identified for example, in Table 1A. In one embodiment, antisense sequence is generated internally, by the organism, in another embodiment, the antisense sequence is separately administered (see, for example, O'Connor, J., Neurochem. 56:560 (1991). Oligodeoxynucleotides as Antisense Inhibitors of Gene Expression, CRC Press, Boca Raton, Fla. (1988). Antisense technology can be used to control gene expression through antisense DNA or RNA, or through triple-helix formation. Antisense techniques are discussed for example, in Okano, J., Neurochem. 56:560 (1991); Oligodeoxynucleotides as Antisense Inhibitors of Gene Expression, CRC Press, Boca Raton, Fla. (1988). Triple helix formation is discussed in, for instance, Lee et al., Nucleic Acids Research 6:3073 (1979); Cooney et al., Science 241:456 (1988); and Dervan et al., Science 251:1300 (1991). The methods are based on binding of a polynucleotide to a complementary DNA or RNA.

[0741] For example, the use of c-myc and c-myb antisense RNA constructs to inhibit the growth of the non-lymphocytic leukemia cell line HL-60 and other cell lines was previously described. (Wickstrom et al. (1988); Anfossi et al. (1989)). These experiments were performed in vitro by incubating cells with the oligoribonucleotide. A similar procedure for in vivo use is described in WO 91/15580. Briefly, a pair of oligonucleotides for a given antisense RNA is produced as follows: A sequence complimentary to the first 15 bases of the open reading frame is flanked by an EcoR1 site on the 5′ end and a HindIII site on the 3′ end. Next, the pair of oligonucleotides is heated at 90° C. for one minute and then annealed in 2×ligation buffer (20 mM TRIS HCl pH 7.5, 10 mM MgCl2, 10 MM dithiothreitol (DTT) and 0.2 mM ATP) and then ligated to the EcoR1/Hind III site of the retroviral vector PMV7 (WO 91/15580).

[0742] For example, the 5′ coding portion of a polynucleotide that encodes the polypeptide of the present invention may be used to design an antisense RNA oligonucleotide of from about 10 to 40 base pairs in length. A DNA oligonucleotide is designed to be complementary to a region of the gene involved in transcription thereby preventing transcription and the production of the receptor. The antisense RNA oligonucleotide hybridizes to the mRNA in vivo and blocks translation of the mRNA molecule into receptor polypeptide.

[0743] In one embodiment, the antisense nucleic acid of the invention is produced intracellularly by transcription from an exogenous sequence. For example, a vector or a portion thereof, is transcribed, producing an antisense nucleic acid (RNA) of the invention. Such a vector would contain a sequence encoding the antisense nucleic acid. Such a vector can remain episomal or become chromosomally integrated, as long as it can be transcribed to produce the desired antisense RNA. Such vectors can be constructed by recombinant DNA technology methods standard in the art. Vectors can be plasmid, viral, or others known in the art, used for replication and expression in vertebrate cells. Expression of the sequence encoding the polypeptide of the present invention or fragments thereof, can be by any promoter known in the art to act in vertebrate, preferably human cells. Such promoters can be inducible or constitutive. Such promoters include, but are not limited to, the SV40 early promoter region (Bemoist and Chambon, Nature 29:304-310 (1981), the promoter contained in the 3′ long terminal repeat of Rous sarcoma virus (Yamamoto et al., Cell 22:787-797 (1980), the herpes thymidine promoter (Wagner et al., Proc. Natl. Acad. Sci. U.S.A. 78:1441-1445 (1981), the regulatory sequences of the metallothionein gene (Brinster, et al., Nature 296:39-42 (1982)), etc.

[0744] The antisense nucleic acids of the invention comprise a sequence complementary to at least a portion of an RNA transcript of a gene of the present invention. However, absolute complementarity, although preferred, is not required. A sequence “complementary to at least a portion of an RNA,” referred to herein, means a sequence having sufficient complementarity to be able to hybridize with the RNA, forming a stable duplex; in the case of double stranded antisense nucleic acids, a single strand of the duplex DNA may thus be tested, or triplex formation may be assayed. The ability to hybridize will depend on both the degree of complementarity and the length of the antisense nucleic acid. Generally, the larger the hybridizing nucleic acid, the more base mismatches with a RNA it may contain and still form a stable duplex (or triplex as the case may be). One skilled in the art can ascertain a tolerable degree of mismatch by use of standard procedures to determine the melting point of the hybridized complex.

[0745] Oligonucleotides that are complementary to the 5′ end of the message, e.g., the 5′ untranslated sequence up to and including the AUG initiation codon, should work most efficiently at inhibiting translation. However, sequences complementary to the 3′ untranslated sequences of mRNAs have been shown to be effective at inhibiting translation of mRNAs as well. See generally, Wagner, R., 1994, Nature 372:333-335. Thus, oligonucleotides complementary to either the 5′- or 3′-non-translated, non-coding regions of polynucleotide sequences described herein could be used in an antisense approach to inhibit translation of endogenous mRNA. Oligonucleotides complementary to the 5′ untranslated region of the mRNA should include the complement of the AUG start codon. Antisense oligonucleotides complementary to mRNA coding regions are less efficient inhibitors of translation but could be used in accordance with the invention. Whether designed to hybridize to the 5′, 3′ or coding region of mRNA of the present invention, antisense nucleic acids should be at least six nucleotides in length, and are preferably oligonucleotides ranging from 6 to about 50 nucleotides in length. In specific aspects the oligonucleotide is at least 10 nucleotides, at least 17 nucleotides, at least 25 nucleotides or at least 50 nucleotides.

[0746] The polynucleotides of the invention can be DNA or RNA or chimeric mixtures or derivatives or modified versions thereof, single-stranded or double-stranded. The oligonucleotide can be modified at the base moiety, sugar moiety, or phosphate backbone, for example, to improve stability of the molecule, hybridization, etc. The oligonucleotide may include other appended groups such as peptides (e.g., for targeting host cell receptors in vivo), or agents facilitating transport across the cell membrane (see, e.g., Letsinger et al., 1989, Proc. Natl. Acad. Sci. U.S.A. 86:6553-6556; Lemaitre et al., 1987, Proc. Natl. Acad. Sci. 84:648-652; PCT Publication No. WO88/09810, published Dec. 15, 1988) or the blood-brain barrier (see, e.g., PCT Publication No. WO89/10134, published Apr. 25, 1988), hybridization-triggered cleavage agents. (See, e.g., Krol et al., 1988, BioTechniques 6:958-976) or intercalating agents. (See, e.g., Zon, 1988, Pharm. Res. 5:539-549). To this end, the oligonucleotide may be conjugated to another molecule, e.g., a peptide, hybridization triggered cross-linking agent, transport agent, hybridization-triggered cleavage agent, etc.

[0747] The antisense oligonucleotide may comprise at least one modified base moiety which is selected from the group including, but not limited to, 5-fluorouracil, 5-bromouracil, 5-chlorouracil, 5-iodouracil, hypoxanthine, xantine, 4-acetylcytosine, 5-(carboxyhydroxylmethyl) uracil, 5-carboxymethylaminomethyl-2-thiouridine, 5-carboxymethylaminomethyluracil, dihydrouracil, beta-D-galactosylqueosine, inosine, N6-isopentenyladenine, 1-methylguanine, 1-methylinosine, 2,2-dimethylguanine, 2-methyladenine, 2-methylguanine, 3-methylcytosine, 5-methylcytosine, N6-adenine, 7-methylguanine, 5-methylaminomethyluracil, 5-methoxyaminomethyl-2-thiouracil, beta-D-mannosylqueosine, 5′-methoxycarboxymethyluracil, 5-methoxyuracil, 2-methylthio-N6-isopentenyladenine, uracil-5-oxyacetic acid (v), wybutoxosine, pseudouracil, queosine, 2-thiocytosine, 5-methyl-2-thiouracil, 2-thiouracil, 4-thiouracil, 5-methyluracil, uracil-5-oxyacetic acid methylester, uracil-5-oxyacetic acid (v), 5-methyl-2-thiouracil, 3-(3-amino-3-N-2-carboxypropyl) uracil, (acp3)w, and 2,6-diaminopurine.

[0748] The antisense oligonucleotide may also comprise at least one modified sugar moiety selected from the group including, but not limited to, arabinose, 2-fluoroarabinose, xylulose, and hexose.

[0749] In yet another embodiment, the antisense oligonucleotide comprises at least one modified phosphate backbone selected from the group including, but not limited to, a phosphorothioate, a phosphorodithioate, a phosphoramidothioate, a phosphoramidate, a phosphordiamidate, a methylphosphonate, an alkyl phosphotriester, and a formacetal or analog thereof.

[0750] In yet another embodiment, the antisense oligonucleotide is an a-anomeric oligonucleotide. An a-anomeric oligonucleotide forms specific double-stranded hybrids with complementary RNA in which, contrary to the usual b-units, the strands run parallel to each other (Gautier et al., 1987, Nucl. Acids Res. 15:6625-6641). The oligonucleotide is a 2′-O-methylribonucleotide (Inoue et al., 1987, Nucl. Acids Res. 15:6131-6148), or a chimeric RNA-DNA analogue (Inoue et al., 1987, FEBS Lett. 215:327-330).

[0751] Polynucleotides of the invention may be synthesized by standard methods known in the art, e.g. by use of an automated DNA synthesizer (such as are commercially available from Biosearch, Applied Biosystems, etc.). As examples, phosphorothioate oligonucleotides may be synthesized by the method of Stein et al. (1988, Nucl. Acids Res. 16:3209), methylphosphonate oligonucleotides can be prepared by use of controlled pore glass polymer supports (Sarin et al., 1988, Proc. Natl. Acad. Sci. U.S.A. 85:7448-7451), etc.

[0752] While antisense nucleotides complementary to the coding region sequence could be used, those complementary to the transcribed untranslated region are most preferred.

[0753] Potential antagonists according to the invention also include catalytic RNA, or a ribozyme (See, e.g., PCT International Publication WO 90/11364, published Oct. 4, 1990; Sarver et al, Science 247:1222-1225 (1990). While ribozymes that cleave mRNA at site specific recognition sequences can be used to destroy mRNAs, the use of hammerhead ribozymes is preferred. Hammerhead ribozymes cleave mRNAs at locations dictated by flanking regions that form complementary base pairs with the target mRNA. The sole requirement is that the target mRNA have the following sequence of two bases: 5′-UG-3′. The construction and production of hammerhead ribozymes is well known in the art and is described more fully in Haseloff and Gerlach, Nature 334:585-591 (1988). There are numerous potential hammerhead ribozyme cleavage sites within the nucleotide sequence of SEQ ID NO:X. Preferably, the ribozyme is engineered so that the cleavage recognition site is located near the 5′ end of the mRNA; i.e., to increase efficiency and minimize the intracellular accumulation of non-functional mRNA transcripts.

[0754] As in the antisense approach, the ribozymes of the invention can be composed of modified oligonucleotides (e.g. for improved stability, targeting, etc.) and should be delivered to cells which express in vivo. DNA constructs encoding the ribozyme may be introduced into the cell in the same manner as described above for the introduction of antisense encoding DNA. A preferred method of delivery involves using a DNA construct “encoding” the ribozyme under the control of a strong constitutive promoter, such as, for example, pol III or pol II promoter, so that transfected cells will produce sufficient quantities of the ribozyme to destroy endogenous messages and inhibit translation. Since ribozymes unlike antisense molecules, are catalytic, a lower intracellular concentration is required for efficiency.

[0755] Antagonist/agonist compounds may be employed to inhibit the cell growth and proliferation effects of the polypeptides of the present invention on neoplastic cells and tissues, i.e. stimulation of angiogenesis of tumors, and, therefore, retard or prevent abnormal cellular growth and proliferation, for example, in tumor formation or growth.

[0756] The antagonist/agonist may also be employed to prevent hyper-vascular diseases, and prevent the proliferation of epithelial lens cells after extracapsular cataract surgery. Prevention of the mitogenic activity of the polypeptides of the present invention may also be desirous in cases such as restenosis after balloon angioplasty.

[0757] The antagonist/agonist may also be employed to prevent the growth of scar tissue during wound healing.

[0758] The antagonist/agonist may also be employed to treat the diseases described herein.

[0759] Thus, the invention provides a method of treating disorders or diseases, including but not limited to the disorders or diseases listed throughout this application, associated with overexpression of a polynucleotide of the present invention by administering to a patient (a) an antisense molecule directed to the polynucleotide of the present invention, and/or (b) a ribozyme directed to the polynucleotide of the present invention.

[0760] Binding Peptides and Other Molecules

[0761] The invention also encompasses screening methods for identifying polypeptides and nonpolypeptides that bind pancreatic antigen polypeptides, and the pancreatic antigen binding molecules identified thereby. These binding molecules are useful, for example, as agonists and antagonists of the pancreatic antigen polypeptides. Such agonists and antagonists can be used, in accordance with the invention, in the therapeutic embodiments described in detail, below.

[0762] This method comprises the steps of:

[0763] contacting pancreatic antigen polypeptides or pancreatic antigen-like polypeptides with a plurality of molecules; and

[0764] identifying a molecule that binds the pancreatic antigen polypeptides or pancreatic antigen-like polypeptides.

[0765] The step of contacting the pancreatic antigen polypeptides or pancreatic antigen-like polypeptides with the plurality of molecules may be effected in a number of ways. For example, one may contemplate immobilizing the pancreatic antigen polypeptides or pancreatic antigen-like polypeptides on a solid support and bringing a solution of the plurality of molecules in contact with the immobilized pancreatic antigen polypeptides or pancreatic antigen-like polypeptides. Such a procedure would be akin to an affinity chromatographic process, with the affinity matrix being comprised of the immobilized pancreatic antigen polypeptides or pancreatic antigen-like polypeptides. The molecules having a selective affinity for the pancreatic antigen polypeptides or pancreatic antigen-like polypeptides can then be purified by affinity selection. The nature of the solid support, process for attachment of the pancreatic antigen polypeptides or pancreatic antigen-like polypeptides to the solid support, solvent, and conditions of the affinity isolation or selection are largely conventional and well known to those of ordinary skill in the art.

[0766] Alternatively, one may also separate a plurality of polypeptides into substantially separate fractions comprising a subset of or individual polypeptides. For instance, one can separate the plurality of polypeptides by gel electrophoresis, column chromatography, or like method known to those of ordinary skill for the separation of polypeptides. The individual polypeptides can also be produced by a transformed host cell in such a way as to be expressed on or about its outer surface (e.g., a recombinant phage). Individual isolates can then be “probed” by the pancreatic antigen polypeptides or pancreatic antigen-like polypeptides, optionally in the presence of an inducer should one be required for expression, to determine if any selective affinity interaction takes place between the pancreatic antigen polypeptides or pancreatic antigen-like polypeptides and the individual clone. Prior to contacting the pancreatic antigen polypeptides or pancreatic antigen-like polypeptides with each fraction comprising individual polypeptides, the polypeptides could first be transferred to a solid support for additional convenience. Such a solid support may simply be a piece of filter membrane, such as one made of nitrocellulose or nylon. In this manner, positive clones could be identified from a collection of transformed host cells of an expression library, which harbor a DNA construct encoding a polypeptide having a selective affinity for pancreatic antigen polypeptides or pancreatic antigen-like polypeptides. Furthermore, the amino acid sequence of the polypeptide having a selective affinity for the pancreatic antigen polypeptides or pancreatic antigen-like polypeptides can be determined directly by conventional means or the coding sequence of the DNA encoding the polypeptide can frequently be determined more conveniently. The primary sequence can then be deduced from the corresponding DNA sequence. If the amino acid sequence is to be determined from the polypeptide itself, one may use microsequencing techniques. The sequencing technique may include mass spectroscopy.

[0767] In certain situations, it may be desirable to wash away any unbound pancreatic antigen polypeptides or pancreatic antigen-like polypeptides, or alternatively, unbound polypeptides, from a mixture of the pancreatic antigen polypeptides or pancreatic antigen-like polypeptides and the plurality of polypeptides prior to attempting to determine or to detect the presence of a selective affinity interaction. Such a wash step may be particularly desirable when the pancreatic antigen polypeptides or pancreatic antigen-like polypeptides or the plurality of polypeptides is bound to a solid support.

[0768] The plurality of molecules provided according to this method may be provided by way of diversity libraries, such as random or combinatorial peptide or nonpeptide libraries which can be screened for molecules that specifically bind pancreatic antigen polypeptides. Many libraries are known in the art that can be used, e.g., chemically synthesized libraries, recombinant (e.g., phage display libraries), and in vitro translation-based libraries. Examples of chemically synthesized libraries are described in Fodor et al., 1991, Science 251:767-773; Houghten et al., 1991, Nature 354:84-86; Lam et al., 1991, Nature 354:82-84; Medynski, 1994, Bio/Technology 12:709-710;Gallop et al., 1994, J. Medicinal Chemistry 37(9):1233-1251; Ohlmeyer et al., 1993, Proc. Natl. Acad. Sci. USA 90:10922-10926; Erb et al., 1994, Proc. Natl. Acad. Sci. USA 91:11422-11426; Houghten et al., 1992, Biotechniques 13:412; Jayawickreme et al., 1994, Proc. Natl. Acad. Sci. USA 91:1614-1618; Salmon et al., 1993, Proc. Natl. Acad. Sci. USA 90:11708-11712; PCT Publication No. WO 93/20242; and Brenner and Lerner, 1992, Proc. Natl. Acad. Sci. USA 89:5381-5383.

[0769] Examples of phage display libraries are described in Scott and Smith, 1990, Science 249:386-390; Devlin et al., 1990, Science, 249:404-406; Christian, R. B., et al., 1992, J. Mol. Biol. 227:711-718); Lenstra, 1992, J. Immunol. Meth. 152:149-157; Kay et al., 1993, Gene 128:59-65; and PCT Publication No. WO 94/18318 dated Aug. 18, 1994.

[0770] In vitro translation-based libraries include but are not limited to those described in PCT Publication No. WO 91/05058 dated Apr. 18, 1991; and Mattheakis et al., 1994, Proc. Natl. Acad. Sci. USA 91:9022-9026.

[0771] By way of examples of nonpeptide libraries, a benzodiazepine library (see e.g., Bunin et al., 1994, Proc. Natl. Acad. Sci. USA 91:4708-4712) can be adapted for use. Peptoid libraries (Simon et al., 1992, Proc. Natl. Acad. Sci. USA 89:9367-9371) can also be used. Another example of a library that can be used, in which the amide functionalities in peptides have been permethylated to generate a chemically transformed combinatorial library, is described by Ostresh et al. (1994, Proc. Natl. Acad. Sci. USA 91:11138-11142).

[0772] The variety of non-peptide libraries that are useful in the present invention is great. For example, Ecker and Crooke, 1995, Bio/Technology 13:351-360 list benzodiazepines, hydantoins, piperazinediones, biphenyls, sugar analogs, beta-mercaptoketones, arylacetic acids, acylpiperidines, benzopyrans, cubanes, xanthines, aminimides, and oxazolones as among the chemical species that form the basis of various libraries.

[0773] Non-peptide libraries can be classified broadly into two types: decorated monomers and oligomers. Decorated monomer libraries employ a relatively simple scaffold structure upon which a variety functional groups is added. Often the scaffold will be a molecule with a known useful pharmacological activity. For example, the scaffold might be the benzodiazepine structure.

[0774] Non-peptide oligomer libraries utilize a large number of monomers that are assembled together in ways that create new shapes that depend on the order of the monomers. Among the monomer units that have been used are carbamates, pyrrolinones, and morpholinos. Peptoids, peptide-like oligomers in which the side chain is attached to the alpha amino group rather than the alpha carbon, form the basis of another version of non-peptide oligomer libraries. The first non-peptide oligomer libraries utilized a single type of monomer and thus contained a repeating backbone. Recent libraries have utilized more than one monomer, giving the libraries added flexibility.

[0775] Screening the libraries can be accomplished by any of a variety of commonly known methods. See, e.g., the following references, which disclose screening of peptide libraries: Parmley and Smith, 1989, Adv. Exp. Med. Biol. 251:215-218; Scott and Smith, 1990, Science 249:386-390; Fowlkes et al., 1992; BioTechniques 13:422-427; Oldenburg et al., 1992, Proc. Natl. Acad. Sci. USA 89:5393-5397; Yu et al., 1994, Cell 76:933-945; Staudt et al., 1988, Science 241:577-580; Bock et al., 1992, Nature 355:564-566; Tuerk et al., 1992, Proc. Natl. Acad. Sci. USA 89:6988-6992; Ellington et al., 1992, Nature 355:850-852; U.S. Pat. Nos. 5,096,815, 5,223,409, and 5,198,346, all to Ladner et al.; Rebar and Pabo, 1993, Science 263:671-673; and CT Publication No. WO 94/18318.

[0776] In a specific embodiment, screening to identify a molecule that binds pancreatic antigen polypeptides can be carried out by contacting the library members with a pancreatic antigen polypeptides or pancreatic antigen-like polypeptides immobilized on a solid phase and harvesting those library members that bind to the pancreatic antigen polypeptides or pancreatic antigen-like polypeptides. Examples of such screening methods, termed “panning” techniques are described by way of example in Parmley and Smith, 1988, Gene 73:305-318; Fowlkes et al., 1992, BioTechniques 13:422-427; International Publication No. WO 94/18318; and in references cited herein.

[0777] In another embodiment, the two-hybrid system for selecting interacting proteins in yeast (Fields and Song, 1989, Nature 340:245-246; Chien et al., 1991, Proc. Natl. Acad. Sci. USA 88:9578-9582) can be used to identify molecules that specifically bind to pancreatic antigen polypeptides or pancreatic antigen-like polypeptides.

[0778] Where the pancreatic antigen binding molecule is a polypeptide, the polypeptide can be conveniently selected from any peptide library, including random peptide libraries, combinatorial peptide libraries, or biased peptide libraries. The term “biased” is used herein to mean that the method of generating the library is manipulated so as to restrict one or more parameters that govern the diversity of the resulting collection of molecules, in this case peptides.

[0779] Thus, a truly random peptide library would generate a collection of peptides in which the probability of finding a particular amino acid at a given position of the peptide is the same for all 20 amino acids. A bias can be introduced into the library, however, by specifying, for example, that a lysine occurs every fifth amino acid or that positions 4, 8, and 9 of a decapeptide library be fixed to include only arginine. Clearly, many types of biases can be contemplated, and the present invention is not restricted to any particular bias. Furthermore, the present invention contemplates specific types of peptide libraries, such as phage displayed peptide libraries and those that utilize a DNA construct comprising a lambda phage vector with a DNA insert.

[0780] As mentioned above, in the case of a pancreatic antigen binding molecule that is a polypeptide, the polypeptide may have about 6 to less than about 60 amino acid residues, preferably about 6 to about 10 amino acid residues, and most preferably, about 6 to about 22 amino acids. In another embodiment, a pancreatic antigen binding polypeptide has in the range of 15-100 amino acids, or 20-50 amino acids.

[0781] The selected pancreatic antigen binding polypeptide can be obtained by chemical synthesis or recombinant expression.

[0782] Other Activities

[0783] A polypeptide, polynucleotide, agonist, or antagonist of the present invention, as a result of the ability to stimulate vascular endothelial cell growth, may be employed in treatment for stimulating re-vascularization of ischemic tissues due to various disease conditions such as thrombosis, arteriosclerosis, and other cardiovascular conditions. The polypeptide, polynucleotide, agonist, or antagonist of the present invention may also be employed to stimulate angiogenesis and limb regeneration, as discussed above.

[0784] A polypeptide, polynucleotide, agonist, or antagonist of the present invention may also be employed for treating wounds due to injuries, burns, post-operative tissue repair, and ulcers since they are mitogenic to various cells of different origins, such as fibroblast cells and skeletal muscle cells, and therefore, facilitate the repair or replacement of damaged or diseased tissue.

[0785] A polypeptide, polynucleotide, agonist, or antagonist of the present invention may also be employed stimulate neuronal growth and to treat and prevent neuronal damage which occurs in certain neuronal disorders or neuro-degenerative conditions such as Alzheimer's disease, Parkinson's disease, and AIDS-related complex. A polypeptide, polynucleotide, agonist, or antagonist of the present invention may have the ability to stimulate chondrocyte growth, therefore, they may be employed to enhance bone and periodontal regeneration and aid in tissue transplants or bone grafts.

[0786] A polypeptide, polynucleotide, agonist, or antagonist of the present invention may be also be employed to prevent skin aging due to sunburn by stimulating keratinocyte growth.

[0787] A polypeptide, polynucleotide, agonist, or antagonist of the present invention may also be employed for preventing hair loss, since FGF family members activate hair-forming cells and promotes melanocyte growth. Along the same lines, a polypeptide, polynucleotide, agonist, or antagonist of the present invention may be employed to stimulate growth and differentiation of hematopoietic cells and bone marrow cells when used in combination with other cytokines.

[0788] A polypeptide, polynucleotide, agonist, or antagonist of the present invention may also be employed to maintain organs before transplantation or for supporting cell culture of primary tissues. A polypeptide, polynucleotide, agonist, or antagonist of the present invention may also be employed for inducing tissue of mesodermal origin to differentiate in early embryos.

[0789] A polypeptide, polynucleotide, agonist, or antagonist of the present invention may also increase or decrease the differentiation or proliferation of embryonic stem cells, besides, as discussed above, hematopoietic lineage.

[0790] A polypeptide, polynucleotide, agonist, or antagonist of the present invention may also be used to modulate mammalian characteristics, such as body height, weight, hair color, eye color, skin, percentage of adipose tissue, pigmentation, size, and shape (e.g., cosmetic surgery). Similarly, a polypeptide, polynucleotide, agonist, or antagonist of the present invention may be used to modulate mammalian metabolism affecting catabolism, anabolism, processing, utilization, and storage of energy.

[0791] A polypeptide, polynucleotide, agonist, or antagonist of the present invention may be used to change a mammal's mental state or physical state by influencing biorhythms, caricadic rhythms, depression (including depressive disorders), tendency for violence, tolerance for pain, reproductive capabilities (preferably by Activin or Inhibin-like activity), hormonal or endocrine levels, appetite, libido, memory, stress, or other cognitive qualities.

[0792] A polypeptide, polynucleotide, agonist, or antagonist of the present invention may also be used as a food additive or preservative, such as to increase or decrease storage capabilities, fat content, lipid, protein, carbohydrate, vitamins, minerals, cofactors or other nutritional components.

[0793] The above-recited applications have uses in a wide variety of hosts. Such hosts include, but are not limited to, human, murine, rabbit, goat, guinea pig, camel, horse, mouse, rat, hamster, pig, micro-pig, chicken, goat, cow, sheep, dog, cat, non-human primate, and human. In specific embodiments, the host is a mouse, rabbit, goat, guinea pig, chicken, rat, hamster, pig, sheep, dog or cat. In preferred embodiments, the host is a mammal. In most preferred embodiments, the host is a human.

[0794] Other Preferred Embodiments

[0795] Other preferred embodiments of the claimed invention include an isolated nucleic acid molecule comprising a nucleotide sequence which is at least 95% identical to a sequence of at least about 50 contiguous nucleotides in the nucleotide sequence of SEQ ID NO:X or the complementary strand thereto, and/or the cDNA in the related cDNA clone contained in the deposit.

[0796] Also preferred is a nucleic acid molecule wherein said sequence of contiguous nucleotides is included in the nucleotide sequence of SEQ ID NO:X in the range of positions identified as “Start” and “End” in columns 7 and 8 as defined for SEQ ID NO:X in Table 1.

[0797] Also preferred is an isolated nucleic acid molecule comprising a nucleotide sequence which is at least 95% identical to a sequence of at least about 150 contiguous nucleotides in the nucleotide sequence of SEQ ID NO:X or the complementary strand thereto, and/or the cDNA in the related cDNA clone contained in the deposit.

[0798] Further preferred is an isolated nucleic acid molecule comprising a nucleotide sequence which is at least 95% identical to a sequence of at least about 500 contiguous nucleotides in the nucleotide sequence of SEQ ID NO:X or the complementary strand thereto, and/or the cDNA in the related cDNA clone contained in the deposit.

[0799] A further preferred embodiment is a nucleic acid molecule comprising a nucleotide sequence which is at least 95% identical to the nucleotide sequence of SEQ ID NO:X in the range of positions identified as “Start” and “End” in columns 7 and 8 as defined for SEQ ID NO:X in Table 1.

[0800] A further preferred embodiment is an isolated nucleic acid molecule comprising a nucleotide sequence which is at least 95% identical to the complete nucleotide sequence of SEQ ID NO:X or the complementary strand thereto, and/or the cDNA in the related cDNA clone contained in the deposit.

[0801] Also preferred is an isolated nucleic acid molecule which hybridizes under stringent hybridization conditions to a nucleic acid molecule comprising a nucleotide sequence of SEQ ID NO:X or the complementary strand thereto, and/or the cDNA in the related cDNA clone contained in the deposit, wherein said nucleic acid molecule which hybridizes does not hybridize under stringent hybridization conditions to a nucleic acid molecule having a nucleotide sequence consisting of only A residues or of only T residues.

[0802] Also preferred is a composition of matter comprising a DNA molecule which comprises a cDNA clone contained in the deposit.

[0803] Also preferred is an isolated nucleic acid molecule comprising a nucleotide sequence which is at least 95% identical to a sequence of at least 50 contiguous nucleotides in the nucleotide sequence of the cDNA in the related cDNA clone contained in the deposit.

[0804] Also preferred is an isolated nucleic acid molecule, wherein said sequence of at least 50 contiguous nucleotides is included in the nucleotide sequence of an open reading frame sequence encoded by the cDNA in the related cDNA clone contained in the deposit.

[0805] Also preferred is an isolated nucleic acid molecule comprising a nucleotide sequence which is at least 95% identical to sequence of at least 150 contiguous nucleotides in the nucleotide sequence encoded by the cDNA in the related cDNA clone contained in the deposit.

[0806] A further preferred embodiment is an isolated nucleic acid molecule comprising a nucleotide sequence which is at least 95% identical to sequence of at least 500 contiguous nucleotides in the nucleotide sequence encoded by the cDNA in the related cDNA clone contained in the deposit.

[0807] A further preferred embodiment is an isolated nucleic acid molecule comprising a nucleotide sequence which is at least 95% identical to the complete nucleotide sequence encoded by the cDNA in the related cDNA clone contained in the deposit.

[0808] A further preferred embodiment is a method for detecting in a biological sample a nucleic acid molecule comprising a nucleotide sequence which is at least 95% identical to a sequence of at least 50 contiguous nucleotides in a sequence selected from the group consisting of: a nucleotide sequence of SEQ ID NO:X or the complementary strand thereto; and a nucleotide sequence encoded by the cDNA in the related cDNA clone contained in the deposit; which method comprises a step of comparing a nucleotide sequence of at least one nucleic acid molecule in said sample with a sequence selected from said group and determining whether the sequence of said nucleic acid molecule in said sample is at least 95% identical to said selected sequence.

[0809] Also preferred is the above method wherein said step of comparing sequences comprises determining the extent of nucleic acid hybridization between nucleic acid molecules in said sample and a nucleic acid molecule comprising said sequence selected from said group. Similarly, also preferred is the above method wherein said step of comparing sequences is performed by comparing the nucleotide sequence determined from a nucleic acid molecule in said sample with said sequence selected from said group. The nucleic acid molecules can comprise DNA molecules or RNA molecules.

[0810] A further preferred embodiment is a method for identifying the species, tissue or cell type of a biological sample which method comprises a step of detecting nucleic acid molecules in said sample, if any, comprising a nucleotide sequence that is at least 95% identical to a sequence of at least 50 contiguous nucleotides in a sequence selected from the group consisting of: a nucleotide sequence of SEQ ID NO:X or the complementary strand thereto; and a nucleotide sequence encoded by the cDNA in the related cDNA clone contained in the deposit.

[0811] Also preferred is the above method for identifying the species, tissue or cell type of a biological sample which comprises a step of detecting nucleic acid molecules comprising a nucleotide sequence in a panel of at least two nucleotide sequences, wherein at least one sequence in said panel is at least 95% identical to a sequence of at least 50 contiguous nucleotides in a sequence selected from said group.

[0812] Also preferred is a method for diagnosing in a subject a pathological condition associated with abnormal structure or expression of a nucleotide sequence of SEQ ID NO:X; or the cDNA in the related cDNA clone identified in Table 1 which encodes a protein, wherein the method comprises a step of detecting in a biological sample obtained from said subject nucleic acid molecules, if any, comprising a nucleotide sequence that is at least 95% identical to a sequence of at least 50 contiguous nucleotides in a sequence selected from the group consisting of: a nucleotide sequence of SEQ ID NO:X or the complementary strand thereto; and a nucleotide sequence of the cDNA in the related cDNA clone contained in the deposit.

[0813] Also preferred is the above method for diagnosing a pathological condition which comprises a step of detecting nucleic acid molecules comprising a nucleotide sequence in a panel of at least two nucleotide sequences, wherein at least one sequence in said panel is at least 95% identical to a sequence of at least 50 contiguous nucleotides in a sequence selected from said group.

[0814] Also preferred is a composition of matter comprising isolated nucleic acid molecules wherein the nucleotide sequences of said nucleic acid molecules comprise a panel of at least two nucleotide sequences, wherein at least one sequence in said panel is at least 95% identical to a sequence of at least 50 contiguous nucleotides in a sequence selected from the group consisting of: a nucleotide sequence of SEQ ID NO:X or the complementary strand thereto; and a nucleotide sequence encoded by the cDNA in the related cDNA clone contained in the deposit. The nucleic acid molecules can comprise DNA molecules or RNA molecules.

[0815] Also preferred is a composition of matter comprising isolated nucleic acid molecules wherein the nucleotide sequences of said nucleic acid molecules comprise a DNA microarray or “chip” of at least 1, 2, 3, 4, 5, 6, 7, 8, 9, 10, 15, 20, 25, 30, 40, 50, 100, 150, 200, 250, 300, 500, 1000, 2000, 3000 or 4000 nucleotide sequences, wherein at least one sequence in said DNA microarray or “chip” is at least 95% identical to a sequence of at least 50 contiguous nucleotides in a sequence selected from the group consisting of: a nucleotide sequence of SEQ ID NO:X or the complementary strand thereto; and a nucleotide sequence encoded by the cDNA in the cDNA clone referenced in Table 1. The nucleic acid molecules can comprise DNA molecules or RNA molecules.

[0816] Also preferred is an isolated polypeptide comprising an amino acid sequence at least 90% identical to a sequence of at least about 10 contiguous amino acids in the polypeptide sequence of SEQ ID NO:Y; a polypeptide encoded by SEQ ID NO:X; and/or a polypeptide encoded by the cDNA in the related cDNA clone contained in the deposit.

[0817] Also preferred is an isolated polypeptide comprising an amino acid sequence at least 95% identical to a sequence of at least about 30 contiguous amino acids in the amino acid sequence of SEQ ID NO:Y; a polypeptide encoded by SEQ ID NO:X; and/or a polypeptide encoded by the cDNA in the related cDNA clone contained in the deposit.

[0818] Further preferred is an isolated polypeptide comprising an amino acid sequence at least 95% identical to a sequence of at least about 100 contiguous amino acids in the amino acid sequence of SEQ ID NO:Y; a polypeptide encoded by SEQ ID NO:X; and/or a polypeptide encoded by the cDNA in the related cDNA clone contained in the deposit.

[0819] Further preferred is an isolated polypeptide comprising an amino acid sequence at least 95% identical to the complete amino acid sequence of SEQ ID NO:Y; a polypeptide encoded by SEQ ID NO:X; and/or a polypeptide encoded by the cDNA in the related cDNA clone contained in the deposit.

[0820] Further preferred is an isolated polypeptide comprising an amino acid sequence at least 90% identical to a sequence of at least about 10 contiguous amino acids in the complete amino acid sequence of a polypeptide encoded by the cDNA clone referenced in Table 1.

[0821] Also preferred is a polypeptide wherein said sequence of contiguous amino acids is included in the amino acid sequence of a portion of said polypeptide encoded by the cDNA clone referenced in Table 1; a polypeptide encoded by SEQ ID NO:X; and/or the polypeptide sequence of SEQ ID NO:Y.

[0822] Also preferred is an isolated polypeptide comprising an amino acid sequence at least 95% identical to a sequence of at least about 30 contiguous amino acids in the amino acid sequence of a polypeptide encoded by the cDNA clone referenced in Table 1.

[0823] Also preferred is an isolated polypeptide comprising an amino acid sequence at least 95% identical to a sequence of at least about 100 contiguous amino acids in the amino acid sequence of a polypeptide encoded by the cDNA clone referenced in Table 1.

[0824] Also preferred is an isolated polypeptide comprising an amino acid sequence at least 95% identical to the amino acid sequence of a polypeptide encoded by the cDNA clone referenced in Table 1.

[0825] Further preferred is an isolated antibody which binds specifically to a polypeptide comprising an amino acid sequence that is at least 90% identical to a sequence of at least 10 contiguous amino acids in a sequence selected from the group consisting of: a polypeptide sequence of SEQ ID NO:Y; a polypeptide encoded by SEQ ID NO:X; and a polypeptide encoded by the cDNA in the related cDNA clone contained in the deposit.

[0826] Further preferred is a method for detecting in a biological sample a polypeptide comprising an amino acid sequence which is at least 90% identical to a sequence of at least 10 contiguous amino acids in a sequence selected from the group consisting of: a polypeptide sequence of SEQ ID NO:Y; a polypeptide encoded by SEQ ID NO:X; and a polypeptide encoded by the cDNA in the related cDNA clone referenced in Table 1; which method comprises a step of comparing an amino acid sequence of at least one polypeptide molecule in said sample with a sequence selected from said group and determining whether the sequence of said polypeptide molecule in said sample is at least 90% identical to said sequence of at least 10 contiguous amino acids.

[0827] Also preferred is the above method wherein said step of comparing an amino acid sequence of at least one polypeptide molecule in said sample with a sequence selected from said group comprises determining the extent of specific binding of polypeptides in said sample to an antibody which binds specifically to a polypeptide comprising an amino acid sequence that is at least 90% identical to a sequence of at least 10 contiguous amino acids in a sequence selected from the group consisting of: a polypeptide sequence of SEQ ID NO:Y; a polypeptide encoded by SEQ ID NO:X; and a polypeptide encoded by the cDNA in the related cDNA clone referenced in Table 1.

[0828] Also preferred is the above method wherein said step of comparing sequences is performed by comparing the amino acid sequence determined from a polypeptide molecule in said sample with said sequence selected from said group.

[0829] Also preferred is a method for identifying the species, tissue or cell type of a biological sample which method comprises a step of detecting polypeptide molecules in said sample, if any, comprising an amino acid sequence that is at least 90% identical to a sequence of at least 10 contiguous amino acids in a sequence selected from the group consisting of: polypeptide sequence of SEQ ID NO:Y; a polypeptide encoded by SEQ ID NO:X; and a polypeptide encoded by the cDNA in the related cDNA clone referenced in Table 1.

[0830] Also preferred is the above method for identifying the species, tissue or cell type of a biological sample, which method comprises a step of detecting polypeptide molecules comprising an amino acid sequence in a panel of at least two amino acid sequences, wherein at least one sequence in said panel is at least 90% identical to a sequence of at least 10 contiguous amino acids in a sequence selected from the above group.

[0831] Also preferred is a method for diagnosing in a subject a pathological condition associated with abnormal structure or expression of a nucleic acid sequence identified in Table 1 encoding a polypeptide, which method comprises a step of detecting in a biological sample obtained from said subject polypeptide molecules comprising an amino acid sequence in a panel of at least two amino acid sequences, wherein at least one sequence in said panel is at least 90% identical to a sequence of at least 10 contiguous amino acids in a sequence selected from the group consisting of: polypeptide sequence of SEQ ID NO:Y; a polypeptide encoded by SEQ ID NO:X; and a polypeptide encoded by the cDNA in the related cDNA clone referenced in Table 1.

[0832] In any of these methods, the step of detecting said polypeptide molecules includes using an antibody.

[0833] Also preferred is an isolated nucleic acid molecule comprising a nucleotide sequence which is at least 95% identical to a nucleotide sequence encoding a polypeptide wherein said polypeptide comprises an amino acid sequence that is at least 90% identical to a sequence of at least 10 contiguous amino acids in a sequence selected from the group consisting of: polypeptide sequence of SEQ ID NO:Y; a polypeptide encoded by SEQ ID NO:X; and a polypeptide encoded by the cDNA in the related cDNA clone referenced in Table 1.

[0834] Also preferred is an isolated nucleic acid molecule, wherein said nucleotide sequence encoding a polypeptide has been optimized for expression of said polypeptide in a prokaryotic host.

[0835] Also preferred is an isolated nucleic acid molecule, wherein said polypeptide comprises an amino acid sequence selected from the group consisting of: polypeptide sequence of SEQ ID NO:Y; a polypeptide encoded by SEQ ID NO:X; and a polypeptide encoded by the cDNA in the related cDNA clone referenced in Table 1.

[0836] Further preferred is a method of making a recombinant vector comprising inserting any of the above isolated nucleic acid molecule into a vector. Also preferred is the recombinant vector produced by this method. Also preferred is a method of making a recombinant host cell comprising introducing the vector into a host cell, as well as the recombinant host cell produced by this method.

[0837] Also preferred is a method of making an isolated polypeptide comprising culturing this recombinant host cell under conditions such that said polypeptide is expressed and recovering said polypeptide. Also preferred is this method of making an isolated polypeptide, wherein said recombinant host cell is a eukaryotic cell and said polypeptide is a human protein comprising an amino acid sequence selected from the group consisting of: polypeptide sequence of SEQ ID NO:Y; a polypeptide encoded by SEQ ID NO:X; and a polypeptide encoded by the cDNA in the related cDNA clone referenced in Table 1. The isolated polypeptide produced by this method is also preferred.

[0838] Also preferred is a method of treatment of an individual in need of an increased level of a protein activity, which method comprises administering to such an individual a Therapeutic comprising an amount of an isolated polypeptide, polynucleotide, immunogenic fragment or analogue thereof, binding agent, antibody, or antigen binding fragment of the claimed invention effective to increase the level of said protein activity in said individual.

[0839] Also preferred is a method of treatment of an individual in need of a decreased level of a protein activity, which method comprised administering to such an individual a Therapeutic comprising an amount of an isolated polypeptide, polynucleotide, immunogenic fragment or analogue thereof, binding agent, antibody, or antigen binding fragment of the claimed invention effective to decrease the level of said protein activity in said individual.

[0840] Having generally described the invention, the same will be more readily understood by reference to the following examples, which are provided by way of illustration and are not intended as limiting.

### EXAMPLES

### Example 1

### Isolation of a Selected cDNA Clone from the Deposited Sample

[0841] Each deposited cDNA clone is contained in a plasmid vector. Table 5 identifies the vectors used to construct the cDNA library from which each clone was isolated. In many cases, the vector used to construct the library is a phage vector from which a plasmid has been excised. The following correlates the related plasmid for each phage vector used in constructing the cDNA library. For example, where a particular clone is identified in Table 5 as being isolated in the vector “Lambda Zap,” the corresponding deposited clone is in “pBluescript.”

| Vector Used to Construct Library | Corresponding Deposited Plasmid |
|---|---|
| Lambda Zap | pBluescript (pBS) |
| Uni-Zap XR | pBluescript (pBS) |
| Zap Express | pBK |
| lafmid BA | plafmid BA |
| pSport1 | pSport1 |
| pCMVSport 2.0 | pCMVSport 2.0 |
| pCMVSport 3.0 | pCMVSport 3.0 |
| pCR ®2.1 | pCR ®2.1 |

[0842] Vectors Lambda Zap (U.S. Pat. Nos. 5,128,256 and 5,286,636), Uni-Zap XR (U.S. Pat. Nos. 5,128,256 and 5,286,636), Zap Express (U.S. Pat. Nos. 5,128,256 and 5,286,636), pBluescript (pBS) (Short, J. M. et al., Nucleic Acids Res. 16:7583-7600 (1988); Alting-Mees, M. A. and Short, J. M., Nucleic Acids Res. 17:9494 (1989)) and pBK (Alting-Mees, M. A. et al., Strategies 5:58-61 (1992)) are commercially available from Stratagene Cloning Systems, Inc., 11011 N. Torrey Pines Road, La Jolla, Calif., 92037. pBS contains an ampicillin resistance gene and pBK contains a neomycin resistance gene. Both can be transformed into E. coli strain XL-1 Blue, also available from Stratagene. pBS comes in 4 forms SK+, SK−, KS+ and KS. The S and K refers to the orientation of the polylinker to the T7 and T3 primer sequences which flank the polylinker region (“S” is for SacI and “K” is for KpnI which are the first sites on each respective end of the linker). “+” or “−” refer to the orientation of the f1 origin of replication (“ori”), such that in one orientation, single stranded rescue initiated from the f1 ori generates sense strand DNA and in the other, antisense.

[0843] Vectors pSport1, pCMVSport 2.0 and pCMVSport 3.0, were obtained from Life Technologies, Inc., P. O. Box 6009, Gaithersburg, Md. 20897. All Sport vectors contain an ampicillin resistance gene and may be transformed into E. coli strain DH10B, also available from Life Technologies. (See, for instance, Gruber, C. E., et al., Focus 15:59 (1993).) Vector lafmid BA (Bento Soares, Columbia University, NY) contains an ampicillin resistance gene and can be transformed into E. coli strain XL-1 Blue. Vector pCR®2.1, which is available from Invitrogen, 1600 Faraday Avenue, Carlsbad, Calif. 92008, contains an ampicillin resistance gene and may be transformed into E. coli strain DH10B, available from Life Technologies. (See, for instance, Clark, J. M., Nuc. Acids Res. 16:9677-9686 (1988) and Mead, D. et al., Bio/Technology 9: (1991).) Preferably, a polynucleotide of the present invention does not comprise the phage vector sequences identified for the particular clone in Table 5, as well as the corresponding plasmid vector sequences designated above.

[0844] The deposited material in the sample assigned the ATCC Deposit Number cited by reference to Table 2 and 5 for any given cDNA clone also may contain one or more additional plasmids, each comprising a cDNA clone different from that given clone. Thus, deposits sharing the same ATCC Deposit Number contain at least a plasmid for each cDNA clone referenced in Table 1.

TABLE 5

| | | | ATCC |
|---|---|---|---|
| Libraries owned by Catalog | Catalog Description | Vector | Deposit |
| HUKA HUKB HUKC HUKD HUKE | Human Uterine Cancer | Lambda ZAP II | LP01 |
| HUKF HUKG | | | |
| HCNA HCNB | Human Colon | Lambda Zap II | LP01 |
| HFFA | Human Fetal Brain, random primed | Lambda Zap II | LP01 |
| HTWA | Resting T-Cell | Lambda ZAP II | LP01 |
| HBQA | Early Stage Human Brain, random | Lambda ZAP II | LP01 |
| | primed | | |
| HLMB HLMF HLMG HLMH HLMI | breast lymph node CDNA library | Lambda ZAP II | LP01 |
| HLMJ HLMM HLMN | | | |
| HCQA HCQB | human colon cancer | Lambda ZAP II | LP01 |
| HMEA HMEC HMED HMEE HMEF | Human Microvascular Endothelial Cells, | Lambda ZAP II | LP01 |
| HMEG HMEI HMEJ HMEK HMEL | fract. A | | |
| HUSA HUSC | Human Umbilical Vein Endothelial | Lambda ZAP II | LP01 |
| | Cells, fract A. | | |
| HLQA HLQB | Hepatocellular Tumor | Lambda ZAP II | LP01 |
| HHGA HHGB HHGC HHGD | Hemangiopericytoma | Lambda ZAP II | LP01 |
| HSDM | Human Striatum Depression, re-rescue | Lambda ZAP II | LP01 |
| HUSH | H Umbilical Vein Endothelial Cells, frac | Lambda ZAP II | LP01 |
| | A, re-excision | | |
| HSGS | Salivary gland, subtracted | Lambda ZAP II | LP01 |
| HFXA HFXB HFXC HFXD HFXE | Brain frontal cortex | Lambda ZAP II | LP01 |
| HFXF HFXG HFXH | | | |
| HPQA HPQB HPQC | PERM TF274 | Lambda ZAP II | LP01 |
| HFXJ HFXK | Brain Frontal Cortex, re-excision | Lambda ZAP II | LP01 |
| HCWA HCWB HCWC HCWD | CD34 positive cells (Cord Blood) | ZAP Express | LP02 |
| HCWE HCWF HCWG HCWH | | | |
| HCWI HCWJ HCWK | | | |
| HCUA HCUB HCUC | CD34 depleted Buffy Coat (Cord Blood) | ZAP Express | LP02 |
| HRSM | A-14 cell line | ZAP Express | LP02 |
| HRSA | A1-CELL LINE | ZAP Express | LP02 |
| HCUD HCUE HCUF HCUG HCUH | CD34 depleted Buffy Coat (Cord | ZAP Express | LP02 |
| HCUI | Blood), re-excision | | |
| HBXE HBXF HBXG | H. Whole Brain #2, re-excision | ZAP Express | LP02 |
| HRLM | L8 cell line | ZAP Express | LP02 |
| HBXA HBXB HBXC HBXD | Human Whole Brain #2 - Oligo dT> | ZAP Express | LP02 |
| | 1.5 Kb | | |
| HUDA HUDB HUDC | Testes | ZAP Express | LP02 |
| HHTM HHTN HHTO | H. hypothalamus, frac A; re-excision | ZAP Express | LP02 |
| HHTL | H. hypothalamus, frac A | ZAP Express | LP02 |
| HASA HASD | Human Adult Spleen | Uni-ZAP XR | LP03 |
| HFKC HFKD HFKE HFKF HFKG | Human Fetal Kidney | Uni-ZAP XR | LP03 |
| HE8A HE8B HE8C HE8D HE8E | Human 8 Week Whole Embryo | Uni-ZAP XR | LP03 |
| HE8F HE8M HE8N | | | |
| HGBA HGBD HGBE HGBF HGBG | Human Gall Bladder | Uni-ZAP XR | LP03 |
| HGBH HGBI | | | |
| HLHA HLHB HLHC HLHD HLHE | Human Fetal Lung III | Uni-ZAP XR | LP03 |
| HLHF HLHG HLHH HLHQ | | | |
| HPMA HPMB HPMC HPMD HPME | Human Placenta | Uni-ZAP XR | LP03 |
| HPMF HPMG HPMH | | | |
| HPRA HPRB HPRC HPRD | Human Prostate | Uni-ZAP XR | LP03 |
| HSIA HSIC HSID HSIE | Human Adult Small Intestine | Uni-ZAP XR | LP03 |
| HTEA HTEB HTEC HTED HTEE | Human Testes | Uni-ZAP XR | LP03 |
| HTEF HTEG HTEH HTEI HTEJ | | | |
| HTEK | | | |
| HTPA HTPB HTPC HTPD HTPE | Human Pancreas Tumor | Uni-ZAP XR | LP03 |
| HTTA HTTB HTTC HTTD HTTE | Human Testes Tumor | Uni-ZAP XR | LP03 |
| HTTF | | | |
| HAPA HAPB HAPC HAPM | Human Adult Pulmonary | Uni-ZAP XR | LP03 |
| HETA HETB HETC HETD HETE | Human Endometrial Tumor | Uni-ZAP XR | LP03 |
| HETF HETG HETH HETI | | | |
| HHFB HHFC HHFD HHFE HHFF | Human Fetal Heart | Uni-ZAP XR | LP03 |
| HHFG HHFH HHFI | | | |
| HHPB HHPC HHPD HHPE HHPF | Human Hippocampus | Uni-ZAP XR | LP03 |
| HHPG HHPH | | | |
| HCE1 HCE2 HCE3 HCE4 HCE5 | Human Cerebellum | Uni-ZAP XR | LP03 |
| HCEB HCEC HCED HCEE HCEF | | | |
| HCEG | | | |
| HUVB HUVC HUVD HUVE | Human Umbilical Vein, Endo. remake | Uni-ZAP XR | LP03 |
| HSTA HSTB HSTC HSTD | Human Skin Tumor | Uni-ZAP XR | LP03 |
| HTAA HTAB HTAC HTAD HTAE | Human Activated T-Cells | Uni-ZAP XR | LP03 |
| HFEA HFEB HFEC | Human Fetal Epithelium (Skin) | Uni-ZAP XR | LP03 |
| HJPA HJPB HJPC HJPD | HUMAN JURKAT MEMBRANE | Uni-ZAP XR | LP03 |
| | BOUND POLYSOMES | | |
| HESA | Human epitheloid sarcoma | Uni-Zap XR | LP03 |
| HLTA HLTB HLTC HLTD HLTE | Human T-Cell Lymphoma | Uni-ZAP XR | LP03 |
| HLTF | | | |
| HFTA HFTB HFTC HFTD | Human Fetal Dura Mater | Uni-ZAP XR | LP03 |
| HRDA HRDB HRDC HRDD HRDE | Human Rhabdomyosarcoma | Uni-ZAP XR | LP03 |
| HRDF | | | |
| HCAA HCAB HCAC | Cem cells cyclohexamide treated | Uni-ZAP XR | LP03 |
| HRGA HRGB HRGC HRGD | Raji Cells, cyclohexamide treated | Uni-ZAP XR | LP03 |
| HSUA HSUB HSUC HSUM | Supt Cells, cyclohexamide treated | Uni-ZAP XR | LP03 |
| HT4A HT4C HT4D | Activated T-Cells, 12 hrs. | Uni-ZAP XR | LP03 |
| HE9A HE9B HE9C HE9D HE9E | Nine Week Old Early Stage Human | Uni-ZAP XR | LP03 |
| HE9F HE9G HE9H HE9M HE9N | | | |
| HATA HATB HATC HATD HATE | Human Adrenal Gland Tumor | Uni-ZAP XR | LP03 |
| HT5A | Activated T-Cells, 24 hrs. | Uni-ZAP XR | LP03 |
| HFGA HFGM | Human Fetal Brain | Uni-ZAP XR | LP03 |
| HNEA HNEB HNEC HNED HNEE | Human Neutrophil | Uni-ZAP XR | LP03 |
| HBGB HBGD | Human Primary Breast Cancer | Uni-ZAP XR | LP03 |
| HBNA HBNB | Human Normal Breast | Uni-ZAP XR | LP03 |
| HCAS | Cem Cells, cyclohexamide treated, | Uni-ZAP XR | LP03 |
| | subtra | | |
| HHPS | Human Hippocampus, subtracted | pBS | LP03 |
| HKCS HKCU | Human Colon Cancer, subtracted | pBS | LP03 |
| HRGS | Raji cells, cyclohexamide treated, | pBS | LP03 |
| | subtracted | | |
| HSUT | Supt cells, cyclohexamide treated, | pBS | LP03 |
| | differentially expressed | | |
| HT4S | Activated T-Cells, 12 hrs, subtracted | Uni-ZAP XR | LP03 |
| HCDA HCDB HCDC HCDD HCDE | Human Chondrosarcoma | Uni-ZAP XR | LP03 |
| HOAA HOAB HOAC | Human Osteosarcoma | Uni-ZAP XR | LP03 |
| HTLA HTLB HTLC HTLD HTLE | Human adult testis, large inserts | Uni-ZAP XR | LP03 |
| HTLF | | | |
| HLMA HLMC HLMD | Breast Lymph node cDNA library | Uni-ZAP XR | LP03 |
| H6EA H6EB H6EC | HL-60, PMA 4H | Uni-ZAP XR | LP03 |
| HTXA HTXB HTXC HTXD HTXE | Activated T-Cell (12 hs)Thiouridine | Uni-ZAP XR | LP03 |
| HTXF HTXG HTXH | labelledEco | | |
| HNFA HNFB HNFC HNFD HNFE | Human Neutrophil, Activated | Uni-ZAP XR | LP03 |
| HNFF HNFG HNFH HNFJ | | | |
| HTOB HTOC | HUMAN TONSILS, FRACTION 2 | Uni-ZAP XR | LP03 |
| HMGB | Human OB MG63 control fraction I | Uni-ZAP XR | LP03 |
| HOPB | Human OB HOS control fraction I | Uni-ZAP XR | LP03 |
| HORB | Human OB HOS treated (10 nM E2) | Uni-ZAP XR | LP03 |
| | fraction I | | |
| HSVA HSVB HSVC | Human Chronic Synovitis | Uni-ZAP XR | LP03 |
| HROA | HUMAN STOMACH | Uni-ZAP XR | LP03 |
| HBJA HBJB HBJC HBJD HBJE | HUMAN B CELL LYMPHOMA | Uni-ZAP XR | LP03 |
| HBJF HBJG HBJH HBJI HBJJ HBJK | | | |
| HCRA HCRB HCRC | Human corpus colosum | Uni-ZAP XR | LP03 |
| HODA HODB HODC HODD | Human ovarian cancer | Uni-ZAP XR | LP03 |
| HDSA | Dermatofibrosarcoma Protuberance | Uni-ZAP XR | LP03 |
| HMWA HMWB HMWC HMWD | Bone Marrow Cell Line (RS4;11) | Uni-ZAP XR | LP03 |
| HMWE HMWF HMWG HMWH | | | |
| HMWI HMWJ | | | |
| HSOA | stomach cancer (human) | Uni-ZAP XR | LP03 |
| HERA | SKIN | Uni-ZAP XR | LP03 |
| HMDA | Brain-medulloblastoma | Uni-ZAP XR | LP03 |
| HGLA HGLB HGLD | Glioblastoma | Uni-ZAP XR | LP03 |
| HEAA | H. Atrophic Endometrium | Uni-ZAP XR | LP03 |
| HBCA HBCB | H. Lymph node breast Cancer | Uni-ZAP XR | LP03 |
| HPWT | Human Prostate BPH, re-excision | Uni-ZAP XR | LP03 |
| HFVG HFVH HFVI | Fetal Liver, subtraction II | pBS | LP03 |
| HNFI | Human Neutrophils, Activated, re- | pBS | LP03 |
| | excision | | |
| HBMB HBMC HBMD | Human Bone Marrow, re-excision | pBS | LP03 |
| HKML HKMM HKMN | H. Kidney Medulla, re-excision | pBS | LP03 |
| HKIX HKIY | H. Kidney Cortex, subtracted | pBS | LP03 |
| HADT | H. Amygdala Depression, subtracted | pBS | LP03 |
| H6AS | H1-60, untreated, subtracted | Uni-ZAP XR | LP03 |
| H6ES | HL-60, PMA 4H, subtracted | Uni-ZAP XR | LP03 |
| H6BS | HL-60, RA 4h, Subtracted | Uni-ZAP XR | LP03 |
| H6CS | HL-60, PMA 1d, subtracted | Uni-ZAP XR | LP03 |
| HTXJ HTXK | Activated T-cell(12 h)/Thiouridine-re- | Uni-ZAP XR | LP03 |
| | excision | | |
| HMSA HMSB HMSC HMSD HMSE | Monocyte activated | Uni-ZAP XR | LP03 |
| HMSF HMSG HMSH HMSI HMSJ | | | |
| HMSK | | | |
| HAGA HAGB HAGC HAGD HAGE | Human Amygdala | Uni-ZAP XR | LP03 |
| HAGF | | | |
| HSRA HSRB HSRE | STROMAL-OSTEOCLASTOMA | Uni-ZAP XR | LP03 |
| HSRD HSRF HSRG HSRH | Human Osteoclastoma Stromal Cells - | Uni-ZAP XR | LP03 |
| | unamplified | | |
| HSQA HSQB HSQC HSQD HSQE | Stromal cell TF274 | Uni-ZAP XR | LP03 |
| HSQF HSQG | | | |
| HSKA HSKB HSKC HSKD HSKE | Smooth muscle, serum treated | Uni-ZAP XR | LP03 |
| HSKF HSKZ | | | |
| HSLA HSLB HSLC HSLD HSLE | Smooth muscle, control | Uni-ZAP XR | LP03 |
| HSLF HSLG | | | |
| HSDA HSDD HSDE HSDF HSDG | Spinal cord | Uni-ZAP XR | LP03 |
| HSDH | | | |
| HPWS | Prostate-BPH subtracted II | pBS | LP03 |
| HSKW HSKX HSKY | Smooth Muscle-HASTE normalized | pBS | LP03 |
| HFPB HFPC HFPD | H. Frontal cortex, epileptic; re-excision | Uni-ZAP XR | LP03 |
| HSDI HSDJ HSDK | Spinal Cord, re-excision | Uni-ZAP XR | LP03 |
| HSKN HSKO | Smooth Muscle Serum Treated, Norm | pBS | LP03 |
| HSKG HSKH HSKI | Smooth muscle, serum induced, re-exc | pBS | LP03 |
| HFCA HFCB HFCC HFCD HFCE | Human Fetal Brain | Uni-ZAP XR | LP04 |
| HFCF | | | |
| HPTA HPTB HPTD | Human Pituitary | Uni-ZAP XR | LP04 |
| HTHB HTHC HTHD | Human Thymus | Uni-ZAP XR | LP04 |
| HE6B HE6C HE6D HE6E HE6F | Human Whole Six Week Old Embryo | Uni-ZAP XR | LP04 |
| HE6G HE6S | | | |
| HSSA HSSB HSSC HSSD HSSE | Human Synovial Sarcoma | Uni-ZAP XR | LP04 |
| HSSF HSSG HSSH HSSI HSSJ | | | |
| HSSK | | | |
| HE7T | 7 Week Old Early Stage Human, | Uni-ZAP XR | LP04 |
| | subtracted | | |
| HEPA HEPB HEPC | Human Epididymus | Uni-ZAP XR | LP04 |
| HSNA HSNB HSNC HSNM HSNN | Human Synovium | Uni-ZAP XR | LP04 |
| HPFB HPFC HPFD HPFE | Human Prostate Cancer, Stage C fraction | Uni-ZAP XR | LP04 |
| HE2A HE2D HE2E HE2H HE2I | 12 Week Old Early Stage Human | Uni-ZAP XR | LP04 |
| HE2M HE2N HE2O | | | |
| HE2B HE2C HE2F HE2G HE2P | 12 Week Old Early Stage Human, II | Uni-ZAP XR | LP04 |
| HE2Q | | | |
| HPTS HPTT HPTU | Human Pituitary, subtracted | Uni-ZAP XR | LP04 |
| HAUA HAUB HAUC | Amniotic Cells - TNF induced | Uni-ZAP XR | LP04 |
| HAQA HAQB HAQC HAQD | Amniotic Cells - Primary Culture | Uni-ZAP XR | LP04 |
| HWTA HWTB HWTC | wilm's tumor | Uni-ZAP XR | LP04 |
| HBSD | Bone Cancer, re-excision | Uni-ZAP XR | LP04 |
| HSGB | Salivary gland, re-excision | Uni-ZAP XR | LP04 |
| HSJA HSJB HSJC | Smooth muscle-ILb induced | Uni-ZAP XR | LP04 |
| HSXA HSXB HSXC HSXD | Human Substantia Nigra | Uni-ZAP XR | LP04 |
| HSHA HSHB HSHC | Smooth muscle, IL1b induced | Uni-ZAP XR | LP04 |
| HOUA HOUB HOUC HOUD HOUE | Adipocytes | Uni-ZAP XR | LP04 |
| HPWA HPWB HPWC HPWD | Prostate BPH | Uni-ZAP XR | LP04 |
| HPWE | | | |
| HELA HELB HELC HELD HELE | Endothelial cells-control | Uni-ZAP XR | LP04 |
| HELF HELG HELH | | | |
| HEMA HEMB HEMC HEMD | Endothelial-induced | Uni-ZAP XR | LP04 |
| HEME HEMF HEMG HEMH | | | |
| HBIA HBIB HBIC | Human Brain, Striatum | Uni-ZAP XR | LP04 |
| HHSA HHSB HHSC HHSD HHSE | Human Hypothalmus, Schizophrenia | Uni-ZAP XR | LP04 |
| HNGA HNGB HNGC HNGD HNGE | neutrophils control | Uni-ZAP XR | LP04 |
| HNGF HNGG HNGH HNGI HNGJ | | | |
| HNHA HNHB HNHC HNHD HNHE | neutrophils IL-1 and LPS induced | Uni-ZAP XR | LP04 |
| HNHF HNHG HNHH HNHI HNHJ | | | |
| HSDB HSDC | STRIATUM DEPRESSION | Uni-ZAP XR | LP04 |
| HHPT | Hypothalamus | Uni-ZAP XR | LP04 |
| HSAT HSAU HSAV HSAW HSAX | Anergic T-cell | Uni-ZAP XR | LP04 |
| HSAY HSAZ | | | |
| HBMS HBMT HBMU HBMV | Bone marrow | Uni-ZAP XR | LP04 |
| HBMW HBMX | | | |
| HOEA HOEB HOEC HOED HOEE | Osteoblasts | Uni-ZAP XR | LP04 |
| HOEF HOEJ | | | |
| HAIA HAIB HAIC HAID HAIE | Epithelial-TNFa and INF induced | Uni-ZAP XR | LP04 |
| HAIF | | | |
| HTGA HTGB HTGC HTGD | Apoptotic T-cell | Uni-ZAP XR | LP04 |
| HMCA HMCB HMCC HMCD | Macrophage-oxLDL | Uni-ZAP XR | LP04 |
| HMCE | | | |
| HMAA HMAB HMAC HMAD | Macrophage (GM-CSF treated) | Uni-ZAP XR | LP04 |
| HMAE HMAF HMAG | | | |
| HPHA | Normal Prostate | Uni-ZAP XR | LP04 |
| HPIA HPIB HPIC | LNCAP prostate cell line | Uni-ZAP XR | LP04 |
| HPJA HPJB HPJC | PC3 Prostate cell line | Uni-ZAP XR | LP04 |
| HOSE HOSF HOSG | Human Osteoclastoma, re-excision | Uni-ZAP XR | LP04 |
| HTGE HTGF | Apoptotic T-cell, re-excision | Uni-ZAP XR | LP04 |
| HMAJ HMAK | Macrophage (GM-CSF treated), re- | Uni-ZAP XR | LP04 |
| | excision | | |
| HACB HACC HACD | Human Adipose Tissue, re-excision | Uni-ZAP XR | LP04 |
| HFPA | H. Frontal Cortex, Epileptic | Uni-ZAP XR | LP04 |
| HFAA HFAB HFAC HFAD HFAE | Alzheimers, spongy change | Uni-ZAP XR | LP04 |
| HFAM | Frontal Lobe, Dementia | Uni-ZAP XR | LP04 |
| HMIA HMIB HMIC | Human Manic Depression Tissue | Uni-ZAP XR | LP04 |
| HTSA HTSE HTSF HTSG HTSH | Human Thymus | pBS | LP05 |
| HPBA HPBB HPBC HPBD HPBE | Human Pineal Gland | pBS | LP05 |
| HSAA HSAB HSAC | HSA 172 Cells | pBS | LP05 |
| HSBA HSBB HSBC HSBM | HSC172 cells | pBS | LP05 |
| HJAA HJAB HJAC HJAD | Jurkat T-cell G1 phase | pBS | LP05 |
| HJBA HJBB HJBC HJBD | Jurkat T-Cell, S phase | pBS | LP05 |
| HAFA HAFB | Aorta endothelial cells + TNF-a | pBS | LP05 |
| HAWA HAWB HAWC | Human White Adipose | pBS | LP05 |
| HTNA HTNB | Human Thyroid | pBS | LP05 |
| HONA | Normal Ovary, Premenopausal | pBS | LP05 |
| HARA HARB | Human Adult Retina | pBS | LP05 |
| HLJA HLJB | Human Lung | pCMVSport 1 | LP06 |
| HOFM HOFN HOFO | H. Ovarian Tumor, II, OV5232 | pCMVSport 2.0 | LP07 |
| HOGA HOGB HOGC | OV 10-3-95 | pCMVSport 2.0 | LP07 |
| HCGL | CD34 + cells, II | pMVSport 2.0 | LP07 |
| HDLA | Hodgkin's Lymphoma I | pCMVSport 2.0 | LP07 |
| HDTA HDTB HDTC HDTD HDTE | Hodgkin's Lymphoma II | pCMVSport 2.0 | LP07 |
| HKAA HKAB HKAC HKAD HKAE | Keratinocyte | pCMVSport2.0 | LP07 |
| HKAF HKAG HKAH | | | |
| HCIM | CAPFINDER, Crohn's Disease, lib 2 | pCMVSport 2.0 | LP07 |
| HKAL | Keratinocyte, lib 2 | pCMVSport2.0 | LP07 |
| HKAT | Keratinocyte, lib 3 | pCMVSport2.0 | LP07 |
| HNDA | Nasal polyps | pCMVSport2.0 | LP07 |
| HDRA | H. Primary Dendritic Cells, lib 3 | pCMVSport2.0 | LP07 |
| HOHA HOHB HOHC | Human Osteoblasts II | pCMVSport2.0 | LP07 |
| HLDA HLDB HLDC | Liver, Hepatoma | pCMVSport3.0 | LP08 |
| HLDN HLDO HLDP | Human Liver, normal | pCMVSport3.0 | LP08 |
| HMTA | pBMC stimulated w/poly I/C | pCMVSport3.0 | LP08 |
| HNTA | NTERA2, control | pCMVSport3.0 | LP08 |
| HDPA HDPB HDPC HDPD HDPF | Primary Dendritic Cells, lib 1 | pCMVSport3.0 | LP08 |
| HDPG HDPH HDPI HDPJ HDPK | | | |
| HDPM HDPN HDPO HDPP | Primary Dendritic cells, frac 2 | pCMVSport3.0 | LP08 |
| HMUA HMUB HMUC | Myoloid Progenitor Cell Line | pCMVSport3.0 | LP08 |
| HHEA HHEB HHEC HHED | T Cell helper I | pCMVSport3.0 | LP08 |
| HHEM HHEN HHEO HHEP | T cell helper II | pCMVSport3.0 | LP08 |
| HEQA HEQB HEQC | Human endometrial stromal cells | pCMVSport3.0 | LP08 |
| HJMA HJMB | Human endometrial stromal cells-treated | pCMVSport3.0 | LP08 |
| | with progesterone | | |
| HSWA HSWB HSWC | Human endometrial stromal cells-treated | pCMVSport3.0 | LP08 |
| | with estradiol | | |
| HSYA HSYB HSYC | Human Thymus Stromal Cells | pCMVSport3.0 | LP08 |
| HLWA HLWB HLWC | Human Placenta | pCMVSport3.0 | LP08 |
| HRAA HRAB HRAC | Rejected Kidney, lib 4 | pCMVSport3.0 | LP08 |
| HMTM | PCR, pBMC I/C treated | PCRII | LP09 |
| HMJA | H. Meningima, M6 | pSport 1 | LP10 |
| HMKA HMKB HMKC HMKD | H. Meningima, M1 | pSport 1 | LP10 |
| HMKE | | | |
| HUSG HUSI | Human umbilical vein endothelial cells, | pSport 1 | LP10 |
| | IL-4 induced | | |
| HUSX HUSY | Human Umbilical Vein Endothelial | pSport 1 | LP10 |
| | Cells, uninduced | | |
| HOFA | Ovarian Tumor I, OV5232 | pSport 1 | LP10 |
| HCFA HCFB HCFC HCFD | T-Cell PHA 16 hrs | pSport 1 | LP10 |
| HCFL HCFM HCFN HCFO | T-Cell PHA 24 hrs | pSport 1 | LP10 |
| HADA HADC HADD HADE HADF | Human Adipose | pSport 1 | LP10 |
| HADG | | | |
| HOVA HOVB HOVC | Human Ovary | pSport 1 | LP10 |
| HTWB HTWC HTWD HTWE | Resting T-Cell Library, II | pSport 1 | LP10 |
| HTWF | | | |
| HMMA | Spleen metastic melanoma | pSport 1 | LP10 |
| HLYA HLYB HLYC HLYD HLYE | Spleen, Chronic lymphocytic leukemia | pSport 1 | LP10 |
| HCGA | CD34 + cell, I | pSport 1 | LP10 |
| HEOM HEON | Human Eosinophils | pSport 1 | LP10 |
| HTDA | Human Tonsil, Lib 3 | pSport 1 | LP10 |
| HSPA | Salivary Gland, Lib 2 | pSport 1 | LP10 |
| HCHA HCHB HCHC | Breast Cancer cell line, MDA 36 | pSport 1 | LP10 |
| HCHM HCHN | Breast Cancer Cell line, angiogenic | pSport 1 | LP10 |
| HCIA | Crohn's Disease | pSport 1 | LP10 |
| HDAA HDAB HDAC | HEL cell line | pSport 1 | LP10 |
| HABA | Human Astrocyte | pSport 1 | LP10 |
| HUFA HUFB HUFC | Ulcerative Colitis | pSport 1 | LP10 |
| HNTM | NTERA2 + retinoic acid, 14 days | pSport 1 | LP10 |
| HDQA | Primary Dendritic cells, CapFinder2, frac 1 | pSport 1 | LP10 |
| HDQM | Primary Dendritic Cells, CapFinder, frac 2 | pSport 1 | LP10 |
| HLDX | Human Liver, normal, CapFinder □ □ □ □ | pSport 1 | LP10 |
| HULA HULB HULC | Human Dermal Endothelial | pSport1 | LP10 |
| | Cells, untreated | | |
| HUMA | Human Dermal Endothelial cells, treated | pSport1 | LP10 |
| HCJA | Human Stromal Endometrial fibroblasts, | pSport1 | LP10 |
| | untreated | | |
| HCJM | Human Stromal endometrial fibroblasts, | pSport1 | LP10 |
| | treated w/estradiol | | |
| HEDA | Human Stromal endometrial fibroblasts, | pSport1 | LP10 |
| | treated with progesterone | | |
| HFNA | Human ovary tumor cell OV350721 | pSport1 | LP10 |
| HKGA HKGB HKGC HKGD | Merkel Cells | pSport1 | LP10 |
| HISA HISB HISC | Pancreas Islet Cell Tumor | pSport1 | LP10 |
| HLSA | Skin, burned | pSport1 | LP10 |
| HBZA | Prostate, BPH, Lib 2 | pSport1 | LP10 |
| HBZS | Prostate BPH, Lib 2, subtracted | pSport1 | LP10 |
| HFIA HFIB HFIC | Synovial Fibroblasts (control) | pSport1 | LP10 |
| HFIH HFII HFIJ | Synovial hypoxia | pSport1 | LP10 |
| HFIT HFIU HFIV | Synovial IL-1/TNF stimulated | pSport1 | LP10 |
| HGCA | Messangial cell, frac 1 | pSport1 | LP10 |
| HMVA HMVB HMVC | Bone Marrow Stromal Cell, untreated | pSport1 | LP10 |
| HFIX HFIY HFIZ | Synovial Fibroblasts (Il1/TNF), subt | pSport1 | LP10 |
| HFOX HFOY HFOZ | Synovial hypoxia-RSF subtracted | pSport1 | LP10 |
| HMQA HMQB HMQC HMQD | Human Activated Monocytes | Uni-ZAP XR | LP11 |
| HLIA HLIB HLIC | Human Liver | pCMVSport 1 | LP012 |
| HHBA HHBB HHBC HHBD HHBE | Human Heart | pCMVSport 1 | LP012 |
| HBBA HBBB | Human Brain | pCMVSport 1 | LP012 |
| HLJA HLJB HLJC HLJD HLJE | Human Lung | pCMVSport 1 | LP012 |
| HOGA HOGB HOGC | Ovarian Tumor | pCMVSport 2.0 | LP012 |
| HTJM | Human Tonsils, Lib 2 | pCMVSport 2.0 | LP012 |
| HAMF HAMG | KMH2 | pCMVSport 3.0 | LP012 |
| HAJA HAJB HAJC | L428 | pCMVSport 3.0 | LP012 |
| HWBA HWBB HWBC HWBD | Dendritic cells, pooled | pCMVSport 3.0 | LP012 |
| HWBE | | | |
| HWAA HWAB HWAC HWAD | Human Bone Marrow, treated | pCMVSport 3.0 | LP012 |
| HWAE | | | |
| HYAA HYAB HYAC | B Cell lymphoma | pCMVSport 3.0 | LP012 |
| HWHG HWHH HWHI | Healing groin wound, 6.5 hours post | pCMVSport 3.0 | LP012 |
| | incision | | |
| HWHP HWHQ HWHR | Healing groin wound; 7.5 hours post | pCMVSport 3.0 | LP012 |
| | incision | | |
| HARM | Healing groin wound - zero hr post- | pCMVSport 3.0 | LP012 |
| | incision (control) | | |
| HBIM | Olfactory epithelium; nasalcavity | pCMVSport 3.0 | LP012 |
| HWDA | Healing Abdomen wound; 70 & 90 min | pCMVSport 3.0 | LP012 |
| | post incision | | |
| HWEA | Healing Abdomen Wound; 15 days post | pCMVSport 3.0 | LP012 |
| | incision | | |
| HWJA | Healing Abdomen Wound; 21 & 29 days | pCMVSport 3.0 | LP012 |
| HNAL | Human Tongue, frac 2 | pSport1 | LP012 |
| HMJA | H. Meniingima, M6 | pSport1 | LP012 |
| HMKA HMKB HMKC HMKD | H. Meningima, M1 | pSport1 | LP012 |
| HMKE | | | |
| HOFA | Ovarian Tumor I, OV5232 | pSport1 | LP012 |
| HCFA HCEB HCFC HCFD | T-Cell PHA 16 hrs | pSport1 | LP012 |
| HCFL HCFM HCFN HCFO | T-Cell PHA 24 hrs | pSport1 | LP012 |
| HMMA HMMB HMMC | Spleen metastic melanoma | pSport1 | LP012 |
| HTDA | Human Tonsil, Lib 3 | pSport1 | LP012 |
| HDBA | Human Fetal Thymus | pSport1 | LP012 |
| HDUA | Pericardium | pSport1 | LP012 |
| HBZA | Prostate, BPH, Lib 2 | pSport1 | LP012 |
| HWCA | Larynx tumor | pSport1 | LP012 |
| HWKA | Normal lung | pSport1 | LP012 |
| HSMB | Bone marrow stroma, treated | pSport1 | LP012 |
| HBHM | Normal trachea | pSport1 | LP012 |
| HLFC | Human Larynx | pSport1 | LP012 |
| HLRB | Siebben Polyposis | pSport1 | LP012 |
| HNIA | Mammary Gland | pSport1 | LP012 |
| HNJB | Palate carcinoma | pSport1 | LP012 |
| HNKA | Palate normal | pSport1 | LP012 |
| HMZA | Pharynx carcinoma | pSport1 | LP012 |
| HABG | Cheek Carcinoma | pSport1 | LP012 |
| HMZM | Pharynx Carcinoma | pSport1 | LP012 |
| HDRM | Larynx Carcinoma | pSport1 | LP012 |
| HVAA | Pancreas normal PCA4 No | pSport1 | LP012 |
| HICA | Tongue carcinoma | pSport1 | LP012 |
| HUKA HUKB HUKC HUKD HUKE | Human Uterine Cancer | Lambda ZAP II | LP013 |
| HFFA | Human Fetal Brain, random primed | Lambda ZAP II | LP013 |
| HTUA | Activated T-cell labeled with 4-thioluri | Lambda ZAP II | LP013 |
| HBQA | Early Stage Human Brain, random | Lambda ZAP II | LP013 |
| | primed | | |
| HMEB | Human microvascular Endothelial cells, | Lambda ZAP II | LP013 |
| | fract. B | | |
| HUSH | Human Umbilical Vein Endothelial | Lambda ZAP II | LP013 |
| | cells, fract. A, re-excision | | |
| HLQC HLQD | Hepatocellular tumor, re-excision | Lambda ZAP II | LP013 |
| HTWJ HTWK HTWL | Resting T-cell, re-excision | Lambda ZAP II | LP013 |
| HF6S | Human Whole 6 week Old Embryo (II), | pBluescript | LP013 |
| | subt | | |
| HHPS | Human Hippocampus, subtracted | pBluescript | LP013 |
| HLIS | LNCAP, differential expression | pBluescript | LP013 |
| HLHS HLHT | Early Stage Human Lung, Subtracted | pBluescript | LP013 |
| HSUS | Supt cells, cyclohexamide treated, | pBluescript | LP013 |
| | subtracted | | |
| HSUT | Supt cells, cyclohexamide treated, | pBluescript | LP013 |
| | differentially expressed | | |
| HSDS | H. Striatum Depression, subtracted | pBluescnpt | LP013 |
| HPTZ | Human Pituitary, Subtracted VII | pBluescript | LP013 |
| HSDX | H. Striatum Depression, subt II | pBluescript | LP013 |
| HSDZ | H. Striatum Depression, subt | pBluescript | LP013 |
| HPBA HPBB HPBC HPBD HPBE | Human Pineal Gland | pBluescript SK- | LP013 |
| HRTA | Colorectal Tumor | pBluescnpt SK- | LP013 |
| HSBA HSBB HSBC HSBM | HSC172 cells | pBluescript SK- | LP013 |
| HJAA HJAB HJAC HJAD | Jurkat T-cell G1 phase | pBluescnpt SK- | LP013 |
| HJBA HJBB HJBC HJBD | Jurkat T-cell, S1 phase | pBluescript SK- | LP013 |
| HTNA HTNB | Human Thyroid | pBluescript SK- | LP013 |
| HAHA HAHB | Human Adult Heart | Uni-ZAP XR | LP013 |
| HE6A | Whole 6 week Old Embryo | Uni-ZAP XR | LP013 |
| HFCA HFCB HFCC HFCD HFCE | Human Fetal Brain | Uni-ZAP XR | LP013 |
| HFKC HFKD HFKE HFKF HFKG | Human Fetal Kidney | Uni-ZAP XR | LP013 |
| HGBA HGBD HGBE HGBF HGBG | Human Gall Bladder | Uni-ZAP XR | LP013 |
| HPRA HPRB HPRC HPRD | Human Prostate | Uni-ZAP XR | LP013 |
| HTEA HTEB HTEC HTED HTEE | Human Testes | Uni-ZAP XR | LP013 |
| HTTA HTTB HTTC HTTD HTTE | Human Testes Tumor | Uni-ZAP XR | LP013 |
| HYBA HYBB | Human Fetal Bone | Uni-ZAP XR | LP013 |
| HFLA | Human Fetal Liver | Uni-ZAP XR | LP013 |
| HHFB HHFC HHFD HHFE HHFF | Human Fetal Heart | Uni-ZAP XR | LP013 |
| HUVB HUVC HUVD HUVE | Human Umbilical Vein, End. remake | Uni-ZAP XR | LP013 |
| HTHB HTHC HTHD | Human Thymus | Uni-ZAP XR | LP013 |
| HSTA HSTB HSTC HSTD | Human Skin Tumor | Uni-ZAP XR | LP013 |
| HTAA HTAB HTAC HTAD HTAE | Human Activated T-cells | Uni-ZAP XR | LP013 |
| HFEA HFEB HFEC | Human Fetal Epithelium (skin) | Uni-ZAP XR | LP013 |
| HJPA HJPB HJPC HJPD | Human Jurkat Membrane Bound | Uni-ZAP XR | LP013 |
| | Polysomes | | |
| HESA | Human Epithelioid Sarcoma | Uni-ZAP XR | LP013 |
| HALS | Human Adult Liver, Subtracted | Uni-ZAP XR | LP013 |
| HFTA HFTB HFTC HFTD | Human Fetal Dura Mater | Uni-ZAP XR | LP013 |
| HCAA HCAB HCAC | Cem cells, cyclohexamide treated | Uni-ZAP XR | LP013 |
| HRGA HRGB HRGC HRGD | Raji Cells, cyclohexamide treated | Uni-ZAP XR | LP013 |
| HE9A HE9B HE9C HE9D HE9E | Nine Week Old Early Stage Human | Uni-ZAP XR | LP013 |
| HSFA | Human Fibrosarcoma | Uni-ZAP XR | LP013 |
| HATA HATB HATC HATD HATE | Human Adrenal Gland Tumor | Uni-ZAP XR | LP013 |
| HTRA | Human Trachea Tumor | Uni-ZAP XR | LP013 |
| HE2A HE2D HE2E HE2H HE2I | 12 Week Old Early Stage Human | Uni-ZAP XR | LP013 |
| HE2B HE2C HE2F HE2G HE2P | 12 Week Old Early Stage Human, II | Uni-ZAP XR | LP013 |
| HNEA HNEB HNEC HNED HNEE | Human Neutrophil | Uni-ZAP XR | LP013 |
| HBGA | Human Primary Breast Cancer | Uni-ZAP XR | LP013 |
| HPTS HPTT HPTU | Human Pituitary, subtracted | Uni-ZAP XR | LP013 |
| HMQA HMQB HMQC HMQD | Human Activated Monocytes | Uni-ZAP XR | LP013 |
| HOAA HOAB HOAC | Human Osteosarcoma | Uni-ZAP XR | LP013 |
| HTOA HTOD HTOE HTOF HTOG | human tonsils | Uni-ZAP XR | LP013 |
| HMGB | Human OB MG63 control fraction I | Uni-ZAP XR | LP013 |
| HOPB | Human OB HOS control fraction I | Uni-ZAP XR | LP013 |
| HOQB | Human OB HOS treated (1 nM E2) | Uni-ZAP XR | LP013 |
| | fraction I | | |
| HAUA HAUB HAUC | Amniotic Cells - TNF induced | Uni-ZAP XR | LP013 |
| HAQA HAQB HAQC HAQD | Amniotic Cells - Primary Culture | Uni-ZAP XR | LP013 |
| HROA HROC | HUMAN STOMACH | Uni-ZAP XR | LP013 |
| HBJA HBJB HBJC HBJD HBJE | HUMAN B CELL LYMPHOMA | Uni-ZAP XR | LP013 |
| HODA HODB HODC HODD | human ovarian cancer | Uni-ZAP XR | LP013 |
| HCPA | Corpus Callosum | Uni-ZAP XR | LP013 |
| HSOA | stomach cancer (human) | Uni-ZAP XR | LP013 |
| HERA | SKIN | Uni-ZAP XR | LP013 |
| HMDA | Brain-medulloblastoma | Uni-ZAP XR | LP013 |
| HGLA HGLB HGLD | Glioblastoma | Uni-ZAP XR | LP013 |
| HWTA HWTB HWTC | wilm's tumor | Uni-ZAP XR | LP013 |
| HEAA | H. Atrophic Endometrium | Uni-ZAP XR | LP013 |
| HAPN HAPO HAPP HAPQ HAPR | Human Adult Pulmonary; re-excision | Uni-ZAP XR | LP013 |
| HLTG HLTH | Human T-cell lymphoma; re-excision | Uni-ZAP XR | LP013 |
| HAHC HAHD HAHE | Human Adult Heart; re-excision | Uni-ZAP XR | LP013 |
| HAGA HAGB HAGC HAGD HAGE | Human Amygdala | Uni-ZAP XR | LP013 |
| HSJA HSJB HSJC | Smooth muscle-ILb induced | Uni-ZAP XR | LP013 |
| HSHA HSHB HSHC | Smooth muscle, IL1b induced | Uni-ZAP XR | LP013 |
| HPWA HPWB HPWC HPWD | Prostate BPH | Uni-ZAP XR | LP013 |
| HPWE | | | |
| HPIA HPIB HPIC | LNCAP prostate cell line | Uni-ZAP XR | LP013 |
| HPJA HPJB HPJC | PC3 Prostate cell line | Uni-ZAP XR | LP013 |
| HBTA | Bone Marrow Stroma, TNF & LPS ind | Uni-ZAP XR | LP013 |
| HMCF HMCG HMCH HMCI HMCJ | Macrophage-oxLDL; re-excision | Uni-ZAP XR | LP013 |
| HAGG HAGH HAGI | Human Amygdala; re-excision | Uni-ZAP XR | LP013 |
| HACA | H. Adipose Tissue | Uni-ZAP XR | LP013 |
| HKFB | K562 + PMA (36 hrs), re-excision | ZAP Express | LP013 |
| HCWT HCWU HCWV | CD34 positive cells (cord blood), re-ex | ZAP Express | LP013 |
| HBWA | Whole brain | ZAP Express | LP013 |
| HBXA HBXB HBXC HBXD | Human Whole Brain #2 - Oligo dT > | ZAP Express | LP013 |
| | 1.5 Kb | | |
| HAVM | Temporal cortex-Alzheizmer | pT-Adv | LP014 |
| HAVT | Hippocampus, Alzheimer Subtracted | pT-Adv | LP014 |
| HHAS | CHME Cell Line | Uni-ZAP XR | LP014 |
| HAJR | Larynx normal | pSport 1 | LP014 |
| HWLE HWLF HWLG HWLH | Colon Normal | pSport 1 | LP014 |
| HCRM HCRN HCRO | Colon Carcinoma | pSport 1 | LP014 |
| HWLI HWLJ HWLK | Colon Normal | pSport 1 | LP014 |
| HWLQ HWLR HWLS HWLT | Colon Tumor | pSport 1 | LP014 |
| HBFM | Gastrocnemius Muscle | pSport 1 | LP014 |
| HBOD HBOE | Quadriceps Muscle | pSport 1 | LP014 |
| HBKD HBKE | Soleus Muscle | pSport 1 | LP014 |
| HCCM | Pancreatic Langerhans | pSport 1 | LP014 |
| HWGA | Larynx carcinoma | pSport 1 | LP014 |
| HWGM HWGN | Larynx carcinoma | pSport 1 | LP014 |
| HWLA HWLB HWLC | Normal colon | pSport 1 | LP014 |
| HWLM HWLN | Colon Tumor | pSport 1 | LP014 |
| HVAM HVAN HVAO | Pancreas Tumor | pSport 1 | LP014 |
| HWGQ | Larynx carcinoma | pSport 1 | LP014 |
| HAQM HAQN | Salivary Gland | pSport 1 | LP014 |
| HASM | Stomach; normal | pSport 1 | LP014 |
| HBCM | Uterus; normal | pSport 1 | LP014 |
| HCDM | Testis; normal | pSport 1 | LP014 |
| HDJM | Brain; normal | pSport 1 | LP014 |
| HEFM | Adrenal Gland, normal | pSport 1 | LP014 |
| HBAA | Rectum normal | pSport 1 | LP014 |
| HFDM | Rectum tumour | pSport 1 | LP014 |
| HGAM | Colon, normal | pSport 1 | LP014 |
| HHMM | Colon, tumour | pSport 1 | LP014 |
| HCLB HCLC | Human Lung Cancer | Lambda Zap II | LP015 |
| HRLA | L1 Cell line | ZAP Express | LP015 |
| HHAM | Hypothalamus, Alzheimer's | pCMVSport 3.0 | LP015 |
| HKBA | Ku 812F Basophils Line | pSport 1 | LP015 |
| HS2S | Saos2, Dexamethosome Treated | pSport 1 | LP016 |
| HA5A | Lung Carcinoma A549 TNFalpha | pSport 1 | LP016 |
| | activated | | |
| HTFM | TF-1 Cell Line GM-CSF Treated | pSport 1 | LP016 |
| HYAS | Thyroid Tumour | pSport 1 | LP016 |
| HUTS | Larynx Normal | pSport 1 | LP016 |
| HXOA | Larynx Tumor | pSport 1 | LP016 |
| HEAH | Ea.hy.926 cell line | pSport 1 | LP016 |
| HINA | Adenocarcinoma Human | pSport 1 | LP016 |
| HRMA | Lung Mesothelium | pSport 1 | LP016 |
| HLCL | Human Pre-Differentiated Adipocytes | Uni-Zap XR | LP017 |
| HS2A | Saos2 Cells | pSport 1 | LP020 |
| HS2I | Saos2 Cells; Vitamin D3 Treated | pSport 1 | LP020 |
| HUCM | CHME Cell Line, untreated | pSport 1 | LP020 |
| HEPN | Aryepiglottis Normal | pSport 1 | LP020 |
| HPSN | Sinus Piniformis Tumour | pSport 1 | LP020 |
| HNSA | Stomach Normal | pSport 1 | LP020 |
| HNSM | Stomach Tumour | pSport 1 | LP020 |
| HNLA | Liver Normal Met5No | pSport 1 | LP020 |
| HUTA | Liver Tumour Met 5 Tu | pSport 1 | LP020 |
| HOCN | Colon Normal | pSport 1 | LP020 |
| HOCT | Colon Tumor | pSport 1 | LP020 |
| HTNT | Tongue Tumour | pSport 1 | LP020 |
| HLXN | Larynx Normal | pSport 1 | LP020 |
| HLXT | Larynx Tumour | pSport 1 | LP020 |
| HTYN | Thymus | pSport 1 | LP020 |
| HPLN | Placenta | pSport 1 | LP020 |
| HTNG | Tongue Normal | pSport 1 | LP020 |
| HZAA | Tyroid Normal (SDCA2 No) | pSport 1 | LP020 |
| HWES | Tyroid Thyroiditis | pSport 1 | LP020 |
| HFHD | Ficolled Human Stromal Cells, 5Fu | pTrip1Ex2 | LP021 |
| | treated | | |
| HFHM, HFHN | Ficolled Human Stromal Cells, | pTrip1Ex2 | LP021 |
| | Untreated | | |
| HPCI | Hep G2 Cells, lambda library | lambda Zap-CMV XR | LP021 |
| HBCA, HBCB, HBCC | H. Lymph node breast Cancer | Uni-ZAP XR | LP021 |
| HCOK | Chondrocytes | pSPORT1 | LP022 |
| HDCA, HDCB, HDCC | Dendritic Cells From CD34 Cells | pSPORT1 | LP022 |
| HDMA, HDMB | CD40 activated monocyte dendritic cells | pSPORT1 | LP022 |
| HDDM, HDDN, HDDO | LPS activated derived dendritic cells | pSPORT1 | LP022 |
| HPCR | Hep G2 Cells, PCR library | lambda Zap-CMV XR | LP022 |
| HAAA, HAAB, HAAC | Lung, Cancer (4005313A3): Invasive | pSPORT1 | LP022 |
| | Poorly Differentiated Lung | | |
| | Adenocarcinoma | | |
| HIPA, HIPB, HIPC | Lung, Cancer (4005163 B7): Invasive, | pSPORT1 | LP022 |
| | Poorly Diff. Adenocarcinoma, | | |
| | Metastatic | | |
| HOOH, HOOI | Ovary, Cancer: (4004562 B6) Papillary | pSPORT1 | LP022 |
| | Serous Cystic Neoplasm, Low | | |
| | Malignant Pot | | |
| HIDA | Lung, Normal: (4005313 B1) | pSPORT1 | LP022 |
| HUJA, HUJB, HUJC, HUJD, HUJE | B-Cells | pCMVSport 3.0 | LP022 |
| HNOA, HNOB, HNOC, HNOD | Ovary, Normal: (9805C040R) | pSPORT1 | LP022 |
| HNLM | Lung, Normal: (4005313 B1) | pSPORT1 | LP022 |
| HSCL | Stromal Cells | pSPORT1 | LP022 |
| HAAX | Lung, Cancer: (4005313 A3) Invasive | pSPORT1 | LP022 |
| | Poorly-differentiated Metastatic lung | | |
| | adenocarcinoma | | |
| HUUA, HUUB, HUUC, HUUD | B-cells (unstimulated) | pTrip1Ex2 | LP022 |
| HWWA, HWWB, HWWC, HWWD, | B-cells (stimulated) | pSPORT1 | LP022 |
| HWWE, HWWF, HWWG | | | |
| HCCC | Colon, Cancer: (9808C064R) | pCMVSport 3.0 | LP023 |
| HPDO HPDP HPDQ HPDR HPD | Ovary, Cancer (9809C332): Poorly | pSport 1 | LP023 |
| | differentiated adenocarcinoma | | |
| HPCO HPCP HPCQ HPCT | Ovary, Cancer (15395A1F): Grade II | pSport 1 | LP023 |
| | Papillary Carcinoma | | |
| HOCM HOCO HOCP HOCQ | Ovary, Cancer: (15799A1F) Poorly | pSport 1 | LP023 |
| | differentiated carcinoma | | |
| HCBM HCBN HCBO | Breast, Cancer: (4004943 A5) | pSport 1 | LP023 |
| HNBT HNBU HNBV | Breast, Normal: (4005522B2) | pSport 1 | LP023 |
| HBCP HBCQ | Breast, Cancer: (4005522 A2) | pSport 1 | LP023 |
| HBCJ | Breast, Cancer: (9806C012R) | pSport 1 | LP023 |
| HSAM HSAN | Stromal cells 3.88 | pSport 1 | LP023 |
| HVCA HVCB HVCC HVCD | Ovary, Cancer: (4004332 A2) | pSport 1 | LP023 |
| HSCK HSEN HSEO | Stromal cells (HBM3.18) | pSport 1 | LP023 |
| HSCP HSCQ | Stromal cell clone 2.5 | pSport 1 | LP023 |
| HUXA | Breast Cancer: (4005385 A2) | pSport 1 | LP023 |
| HCOM HCON HCOO HCOP HCOQ | Ovary, Cancer (4004650 A3): Well- | pSport 1 | LP023 |
| | Differentiated Micropapillary Serous | | |
| | Carcinoma | | |
| HBNM | Breast, Cancer: (9802C020E) | pSport 1 | LP023 |
| HVVA HVVB HVVC HVVD HVVE | Human Bone Marrow, treated | pSport 1 | LP023 |

[0845] Two approaches can be used to isolate a particular clone from the deposited sample of plasmid DNAs cited for that clone in Table 5. First, a plasmid is directly isolated by screening the clones using a polynucleotide probe corresponding to the nucleotide sequence of SEQ ID NO:X.

[0846] Particularly, a specific polynucleotide with 30-40 nucleotides is synthesized using an Applied Biosystems DNA synthesizer according to the sequence reported. The oligonucleotide is labeled, for instance, with ³²P-γ-ATP using T4 polynucleotide kinase and purified according to routine methods. (E.g., Maniatis et al., Molecular Cloning: A Laboratory Manual, Cold Spring Harbor Press, Cold Spring, N.Y. (1982).) The plasmid mixture is transformed into a suitable host, as indicated above (such as XL-1 Blue (Stratagene)) using techniques known to those of skill in the art, such as those provided by the vector supplier or in related publications or patents cited above. The transformants are plated on 1.5% agar plates (containing the appropriate selection agent, e.g., ampicillin) to a density of about 150 transformants (colonies) per plate. These plates are screened using Nylon membranes according to routine methods for bacterial colony screening (e.g., Sambrook et al., Molecular Cloning: A Laboratory Manual, 2nd Edit., (1989), Cold Spring Harbor Laboratory Press, pages 1.93 to 1.104), or other techniques known to those of skill in the art.

[0847] Alternatively, two primers of 17-20 nucleotides derived from both ends of the nucleotide sequence of SEQ ID NO:X are synthesized and used to amplify the desired cDNA using the deposited cDNA plasmid as a template. The polymerase chain reaction is carried out under routine conditions, for instance, in 25 μl of reaction mixture with 0.5 ug of the above cDNA template. A convenient reaction mixture is 1.5-5 mM MgCl₂, 0.01% (w/v) gelatin, 20 μM each of dATP, dCTP, dGTP, dTTP, 25 pmol of each primer and 0.25 Unit of Taq polymerase. Thirty five cycles of PCR (denaturation at 94° C. for 1 min; annealing at 55° C. for 1 min; elongation at 72° C. for 1 min) are performed with a Perkin-Elmer Cetus automated thermal cycler. The amplified product is analyzed by agarose gel electrophoresis and the DNA band with expected molecular weight is excised and purified. The PCR product is verified to be the selected sequence by subcloning and sequencing the DNA product.

[0848] Several methods are available for the identification of the 5′ or 3′ non-coding portions of a gene which may not be present in the deposited clone. These methods include but are not limited to, filter probing, clone enrichment using specific probes, and protocols similar or identical to 5′ and 3′ “RACE” protocols which are well known in the art. For instance, a method similar to 5′ RACE is available for generating the missing 5′ end of a desired full-length transcript. (Fromont-Racine et al., Nucleic Acids Res. 21(7):1683-1684 (1993).)

[0849] Briefly, a specific RNA oligonucleotide is ligated to the 5′ ends of a population of RNA presumably containing full-length gene RNA transcripts. A primer set containing a primer specific to the ligated RNA oligonucleotide and a primer specific to a known sequence of the gene of interest is used to PCR amplify the 5′ portion of the desired full-length gene. This amplified product may then be sequenced and used to generate the full length gene.

[0850] This above method starts with total RNA isolated from the desired source, although poly-A+ RNA can be used. The RNA preparation can then be treated with phosphatase if necessary to eliminate 5′ phosphate groups on degraded or damaged RNA which may interfere with the later RNA ligase step. The phosphatase should then be inactivated and the RNA treated with tobacco acid pyrophosphatase in order to remove the cap structure present at the 5′ ends of messenger RNAs. This reaction leaves a 5′ phosphate group at the 5′ end of the cap cleaved RNA which can then be ligated to an RNA oligonucleotide using T4 RNA ligase.

[0851] This modified RNA preparation is used as a template for first strand cDNA synthesis using a gene specific oligonucleotide. The first strand synthesis reaction is used as a template for PCR amplification of the desired 5′ end using a primer specific to the ligated RNA oligonucleotide and a primer specific to the known sequence of the gene of interest. The resultant product is then sequenced and analyzed to confirm that the 5′ end sequence belongs to the desired gene.

### Example 2

### Isolation of Genomic Clones Corresponding to a Polynucleotide

[0852] A human genomic P1 library (Genomic Systems, Inc.) is screened by PCR using primers selected for the sequence corresponding to SEQ ID NO:X, according to the method described in Example 1. (See also, Sambrook.)

### Example 3

### Tissue Specific Expression Analysis

[0853] The Human Genome Sciences, Inc. (HGS) database is derived from sequencing tissue specific cDNA libraries. Libraries generated from a particular tissue are selected and the specific tissue expression pattern of EST groups or assembled contigs within these libraries is determined by comparison of the expression patterns of those groups or contigs within the entire database. ESTs which show tissue specific expression are selected.

[0854] The original clone from which the specific EST sequence was generated, is obtained from the catalogued library of clones and the insert amplified by PCR using methods known in the art. The PCR product is denatured then transferred in 96 well format to a nylon membrane (Schleicher and Scheull) generating an array filter of tissue specific clones. Housekeeping genes, maize genes, and known tissue specific genes are included on the filters. These targets can be used in signal normalization and to validate assay sensitivity. Additional targets are included to monitor probe length and specificity of hybridization.

[0855] Radioactively labeled hybridization probes are generated by first strand cDNA synthesis per the manufacturer's instructions (Life Technologies) from mRNA/RNA samples prepared from the specific tissue being analyzed. The hybridization probes are purified by gel exclusion chromatography, quantitated, and hybridized with the array filters in hybridization bottles at 65° C. overnight. The filters are washed under stringent conditions and signals are captured using a Fuji phosphorimager.

[0856] Data is extracted using AIS software and following background subtraction, signal normalization is performed. This includes a normalization of filter-wide expression levels between different experimental runs. Genes that are differentially expressed in the tissue of interest are identified and the full length sequence of these clones is generated.

### Example 4

### Chromosomal Mapping of the Polynucleotides

[0857] An oligonucleotide primer set is designed according to the sequence at the 5′ end of SEQ ID NO:X. This primer preferably spans about 100 nucleotides. This primer set is then used in a polymerase chain reaction under the following set of conditions: 30 seconds, 95° C.; 1 minute, 56° C.; 1 minute, 70° C. This cycle is repeated 32 times followed by one 5 minute cycle at 70° C. Human, mouse, and hamster DNA is used as template in addition to a somatic cell hybrid panel containing individual chromosomes or chromosome fragments (Bios, Inc). The reactions is analyzed on either 8% polyacrylamide gels or 3.5% agarose gels. Chromosome mapping is determined by the presence of an approximately 100 bp PCR fragment in the particular somatic cell hybrid.

### Example 5

### Bacterial Expression of a Polypeptide

[0858] A polynucleotide encoding a polypeptide of the present invention is amplified using PCR oligonucleotide primers corresponding to the 5′ and 3′ ends of the DNA sequence, as outlined in Example 1, to synthesize insertion fragments. The primers used to amplify the cDNA insert should preferably contain restriction sites, such as BamHI and XbaI, at the 5′ end of the primers in order to clone the amplified product into the expression vector. For example, BamHI and XbaI correspond to the restriction enzyme sites on the bacterial expression vector pQE-9. (Qiagen, Inc., Chatsworth, Calif.). This plasmid vector encodes antibiotic resistance (Amp^{r}), a bacterial origin of replication (ori), an IPTG-regulatable promoter/operator (P/O), a ribosome binding site (RBS), a 6-histidine tag (6-His), and restriction enzyme cloning sites.

[0859] The pQE-9 vector is digested with BamHI and XbaI and the amplified fragment is ligated into the pQE-9 vector maintaining the reading frame initiated at the bacterial RBS. The ligation mixture is then used to transform the E. coli strain M15/rep4 (Qiagen, Inc.) which contains multiple copies of the plasmid pREP4, which expresses the lacI repressor and also confers kanamycin resistance (Kan^{r}). Transformants are identified by their ability to grow on LB plates and ampicillin/kanamycin resistant colonies are selected. Plasmid DNA is isolated and confirmed by restriction analysis.

[0860] Clones containing the desired constructs are grown overnight (O/N) in liquid culture in LB media supplemented with both Amp (100 ug/ml) and Kan (25 ug/ml). The O/N culture is used to inoculate a large culture at a ratio of 1:100 to 1:250. The cells are grown to an optical density 600 (O.D.⁶⁰⁰) of between 0.4 and 0.6. IPTG (Isopropyl-B-D-thiogalacto pyranoside) is then added to a final concentration of 1 mM. IPTG induces by inactivating the lacI repressor, clearing the P/O leading to increased gene expression.

[0861] Cells are grown for an extra 3 to 4 hours. Cells are then harvested by centrifugation (20 mins at 6000×g). The cell pellet is solubilized in the chaotropic agent 6 Molar Guanidine HCl by stirring for 3-4 hours at 4° C. The cell debris is removed by centrifugation, and the supernatant containing the polypeptide is loaded onto a nickel-nitrilo-tri-acetic acid (“Ni-NTA”) affinity resin column (available from QIAGEN, Inc., supra). Proteins with a 6×His tag bind to the Ni-NTA resin with high affinity and can be purified in a simple one-step procedure (for details see: The QIAexpressionist (1995) QIAGEN, Inc., supra).

[0862] Briefly, the supernatant is loaded onto the column in 6 M guanidine-HCl, pH 8, the column is first washed with 10 volumes of 6 M guanidine-HCl, pH 8, then washed with 10 volumes of 6 M guanidine-HCl pH 6, and finally the polypeptide is eluted with 6 M guanidine-HCl, pH 5.

[0863] The purified protein is then renatured by dialyzing it against phosphate-buffered saline (PBS) or 50 mM Na-acetate, pH 6 buffer plus 200 mM NaCl. Alternatively, the protein can be successfully refolded while immobilized on the Ni-NTA column. The recommended conditions are as follows: renature using a linear 6M-1M urea gradient in 500 mM NaCl, 20% glycerol, 20 mM Tris/HCl pH 7.4, containing protease inhibitors. The renaturation should be performed over a period of 1.5 hours or more. After renaturation the proteins are eluted by the addition of 250 mM immidazole. Immidazole is removed by a final dialyzing step against PBS or 50 mM sodium acetate pH 6 buffer plus 200 mM NaCl. The purified protein is stored at 4° C. or frozen at −80° C.

[0864] In addition to the above expression vector, the present invention further includes an expression vector comprising phage operator and promoter elements operatively linked to a polynucleotide of the present invention, called pHE4a. (ATCC Accession Number 209645, deposited on Feb. 25, 1998.) This vector contains: 1) a neomycinphosphotransferase gene as a selection marker, 2) an E. coli origin of replication, 3) a T5 phage promoter sequence, 4) two lac operator sequences, 5) a Shine-Delgarno sequence, and 6) the lactose operon repressor gene (lacIq). The origin of replication (oriC) is derived from pUC19 (LTI, Gaithersburg, Md.). The promoter sequence and operator sequences are made synthetically.

[0865] DNA can be inserted into the pHEa by restricting the vector with NdeI and XbaI, BamHI, XhoI, or Asp718, running the restricted product on a gel, and isolating the larger fragment (the stuffer fragment should be about 310 base pairs). The DNA insert is generated according to the PCR protocol described in Example 1, using PCR primers having restriction sites for NdeI (5′ primer) and XbaI, BamHI, XhoI, or Asp718 (3′ primer). The PCR insert is gel purified and restricted with compatible enzymes. The insert and vector are ligated according to standard protocols.

[0866] The engineered vector could easily be substituted in the above protocol to express protein in a bacterial system.

### Example 6

### Purification of a Polypeptide from an Inclusion Body

[0867] The following alternative method can be used to purify a polypeptide expressed in E. coli when it is present in the form of inclusion bodies. Unless otherwise specified, all of the following steps are conducted at 4-10° C.

[0868] Upon completion of the production phase of the E. coli fermentation, the cell culture is cooled to 4-10° C. and the cells harvested by continuous centrifugation at 15,000 rpm (Heraeus Sepatech). On the basis of the expected yield of protein per unit weight of cell paste and the amount of purified protein required, an appropriate amount of cell paste, by weight, is suspended in a buffer solution containing 100 mM Tris, 50 mM EDTA, pH 7.4. The cells are dispersed to a homogeneous suspension using a high shear mixer.

[0869] The cells are then lysed by passing the solution through a microfluidizer (Microfuidics, Corp. or APV Gaulin, Inc.) twice at 4000-6000 psi. The homogenate is then mixed with NaCl solution to a final concentration of 0.5 M NaCl, followed by centrifugation at 7000×g for 15 min. The resultant pellet is washed again using 0.5M NaCl, 100 mM Tris, 50 mM EDTA, pH 7.4.

[0870] The resulting washed inclusion bodies are solubilized with 1.5 M guanidine hydrochloride (GuHCl) for 2-4 hours. After 7000×g centrifugation for 15 min., the pellet is discarded and the polypeptide containing supernatant is incubated at 4° C. overnight to allow further GuHCl extraction.

[0871] Following high speed centrifugation (30,000×g) to remove insoluble particles, the GuHCl solubilized protein is refolded by quickly mixing the GuHCl extract with 20 volumes of buffer containing 50 mM sodium, pH 4.5, 150 mM NaCl, 2 mM EDTA by vigorous stirring. The refolded diluted protein solution is kept at 4° C. without mixing for 12 hours prior to further purification steps.

[0872] To clarify the refolded polypeptide solution, a previously prepared tangential filtration unit equipped with 0.16 μm membrane filter with appropriate surface area (e.g., Filtron), equilibrated with 40 mM sodium acetate, pH 6.0 is employed. The filtered sample is loaded onto a cation exchange resin (e.g., Poros HS-50, Perseptive Biosystems). The column is washed with 40 mM sodium acetate, pH 6.0 and eluted with 250 mM, 500 mM, 1000 mM, and 1500 mM NaCl in the same buffer, in a stepwise manner. The absorbance at 280 nm of the effluent is continuously monitored. Fractions are collected and further analyzed by SDS-PAGE.

[0873] Fractions containing the polypeptide are then pooled and mixed with 4 volumes of water. The diluted sample is then loaded onto a previously prepared set of tandem columns of strong anion (Poros HQ-50, Perseptive Biosystems) and weak anion (Poros CM-20, Perseptive Biosystems) exchange resins. The columns are equilibrated with 40 mM sodium acetate, pH 6.0. Both columns are washed with 40 mM sodium acetate, pH 6.0, 200 mM NaCl. The CM-20 column is then eluted using a 10 column volume linear gradient ranging from 0.2 M NaCl, 50 mM sodium acetate, pH 6.0 to 1.0 M NaCl, 50 mM sodium acetate, pH 6.5. Fractions are collected under constant A₂₈₀ monitoring of the effluent. Fractions containing the polypeptide (determined, for instance, by 16% SDS-PAGE) are then pooled.

[0874] The resultant polypeptide should exhibit greater than 95% purity after the above refolding and purification steps. No major contaminant bands should be observed from Commassie blue stained 16% SDS-PAGE gel when 5 μg of purified protein is loaded. The purified protein can also be tested for endotoxin/LPS contamination, and typically the LPS content is less than 0.1 ng/ml according to LAL assays.

### Example 7

### Cloning and Expression of a Polypeptide in a Baculovirus Expression System

[0875] In this example, the plasmid shuttle vector pA2 is used to insert a polynucleotide into a baculovirus to express a polypeptide. This expression vector contains the strong polyhedrin promoter of the Autographa californica nuclear polyhedrosis virus (AcMNPV) followed by convenient restriction sites such as BamHI, Xba I and Asp718. The polyadenylation site of the simian virus 40 (“SV40”) is used for efficient polyadenylation. For easy selection of recombinant virus, the plasmid contains the beta-galactosidase gene from E. coli under control of a weak Drosophila promoter in the same orientation, followed by the polyadenylation signal of the polyhedrin gene. The inserted genes are flanked on both sides by viral sequences for cell-mediated homologous recombination with wild-type viral DNA to generate a viable virus that express the cloned polynucleotide.

[0876] Many other baculovirus vectors can be used in place of the vector above, such as pAc373, pVL941, and pAcIM1, as one skilled in the art would readily appreciate, as long as the construct provides appropriately located signals for transcription, translation, secretion and the like, including a signal peptide and an in-frame AUG as required. Such vectors are described, for instance, in Luckow et al., Virology 170:31-39 (1989).

[0877] Specifically, the cDNA sequence contained in the deposited clone, including the AUG initiation codon, is amplified using the PCR protocol described in Example 1. If a naturally occurring signal sequence is used to produce the polypeptide of the present invention, the pA2 vector does not need a second signal peptide. Alternatively, the vector can be modified (pA2 GP) to include a baculovirus leader sequence, using the standard methods described in Summers et al., “A Manual of Methods for Baculovirus Vectors and Insect Cell Culture Procedures,” Texas Agricultural Experimental Station Bulletin No. 1555 (1987).

[0878] The amplified fragment is isolated from a 1% agarose gel using a commercially available kit (“Geneclean,” BIO 101 Inc., La Jolla, Calif.). The fragment then is digested with appropriate restriction enzymes and again purified on a 1% agarose gel.

[0879] The plasmid is digested with the corresponding restriction enzymes and optionally, can be dephosphorylated using calf intestinal phosphatase, using routine procedures known in the art. The DNA is then isolated from a 1% agarose gel using a commercially available kit (“Geneclean” BIO 101 Inc., La Jolla, Calif.).

[0880] The fragment and the dephosphorylated plasmid are ligated together with T4 DNA ligase. E. coli HB101 or other suitable E. coli hosts such as XL-1 Blue (Stratagene Cloning Systems, La Jolla, Calif.) cells are transformed with the ligation mixture and spread on culture plates. Bacteria containing the plasmid are identified by digesting DNA from individual colonies and analyzing the digestion product by gel electrophoresis. The sequence of the cloned fragment is confirmed by DNA sequencing.

[0881] Five μg of a plasmid containing the polynucleotide is co-transfected with 1.0 μg of a commercially available linearized baculovirus DNA (“BaculoGold™ baculovirus DNA”, Pharmingen, San Diego, Calif.), using the lipofection method described by Felgner et al., Proc. Natl. Acad. Sci. USA 84:7413-7417 (1987). One μg of BaculoGold™ virus DNA and 5 μg of the plasmid are mixed in a sterile well of a microtiter plate containing 50 μl of serum-free Grace's medium (Life Technologies Inc., Gaithersburg, Md.). Afterwards, 10 μl Lipofectin plus 90 μl Grace's medium are added, mixed and incubated for 15 minutes at room temperature. Then the transfection mixture is added drop-wise to Sf9 insect cells (ATCC CRL 1711) seeded in a 35 mm tissue culture plate with 1 ml Grace's medium without serum. The plate is then incubated for 5 hours at 27° C. The transfection solution is then removed from the plate and 1 ml of Grace's insect medium supplemented with 10% fetal calf serum is added. Cultivation is then continued at 27° C. for four days.

[0882] After four days the supernatant is collected and a plaque assay is performed, as described by Summers and Smith, supra. An agarose gel with “Blue Gal” (Life Technologies Inc., Gaithersburg) is used to allow easy identification and isolation of gal-expressing clones, which produce blue-stained plaques. (A detailed description of a “plaque assay” of this type can also be found in the user's guide for insect cell culture and baculovirology distributed by Life Technologies Inc., Gaithersburg, page 9-10.) After appropriate incubation, blue stained plaques are picked with the tip of a micropipettor (e.g., Eppendorf). The agar containing the recombinant viruses is then resuspended in a microcentrifuge tube containing 200 μl of Grace's medium and the suspension containing the recombinant baculovirus is used to infect Sf9 cells seeded in 35 mm dishes. Four days later the supernatants of these culture dishes are harvested and then they are stored at 4° C.

[0883] To verify the expression of the polypeptide, Sf9 cells are grown in Grace's medium supplemented with 10% heat-inactivated FBS. The cells are infected with the recombinant baculovirus containing the polynucleotide at a multiplicity of infection (“MOI”) of about 2. If radiolabeled proteins are desired, 6 hours later the medium is removed and is replaced with SF900 II medium minus methionine and cysteine (available from Life Technologies Inc., Rockville, Md.). After 42 hours, 5 μCi of ³⁵S-methionine and 5 μCi ³⁵S-cysteine (available from Amersham) are added. The cells are further incubated for 16 hours and then are harvested by centrifugation. The proteins in the supernatant as well as the intracellular proteins are analyzed by SDS-PAGE followed by autoradiography (if radiolabeled).

[0884] Microsequencing of the amino acid sequence of the amino terminus of purified protein may be used to determine the amino terminal sequence of the produced protein.

### Example 8

### Expression of a Polypeptide in Mammalian Cells

[0885] The polypeptide of the present invention can be expressed in a mammalian cell. A typical mammalian expression vector contains a promoter element, which mediates the initiation of transcription of mRNA, a protein coding sequence, and signals required for the termination of transcription and polyadenylation of the transcript. Additional elements include enhancers, Kozak sequences and intervening sequences flanked by donor and acceptor sites for RNA splicing. Highly efficient transcription is achieved with the early and late promoters from SV40, the long terminal repeats (LTRs) from Retroviruses, e.g., RSV, HTLVI, HIVI and the early promoter of the cytomegalovirus (CMV). However, cellular elements can also be used (e.g., the human actin promoter).

[0886] Suitable expression vectors for use in practicing the present invention include, for example, vectors such as pSVL and pMSG (Pharmacia, Uppsala, Sweden), pRSVcat (ATCC 37152), pSV2dhfr (ATCC 37146), pBC12MI (ATCC 67109), pCMVSport 2.0, and pCMVSport 3.0. Mammalian host cells that could be used include, human Hela, 293, H9 and Jurkat cells, mouse NIH3T3 and C127 cells, Cos 1, Cos 7 and CV1, quail QC1-3 cells, mouse L cells and Chinese hamster ovary (CHO) cells.

[0887] Alternatively, the polypeptide can be expressed in stable cell lines containing the polynucleotide integrated into a chromosome. The co-transfection with a selectable marker such as DHFR, gpt, neomycin, hygromycin allows the identification and isolation of the transfected cells.

[0888] The transfected gene can also be amplified to express large amounts of the encoded protein. The DHFR (dihydrofolate reductase) marker is useful in developing cell lines that carry several hundred or even several thousand copies of the gene of interest. (See, e.g., Alt, F. W., et al., J. Biol. Chem. 253:1357-1370 (1978); Hamlin, J. L. and Ma, C., Biochem. et Biophys. Acta, 1097:107-143 (1990); Page, M. J. and Sydenham, M. A., Biotechnology 9:64-68 (1991).) Another useful selection marker is the enzyme glutamine synthase (GS) (Murphy et al., Biochem J. 227:277-279 (1991); Bebbington et al., Bio/Technology 10:169-175 (1992). Using these markers, the mammalian cells are grown in selective medium and the cells with the highest resistance are selected. These cell lines contain the amplified gene(s) integrated into a chromosome. Chinese hamster ovary (CHO) and NSO cells are often used for the production of proteins.

[0889] Derivatives of the plasmid pSV2-dhfr (ATCC Accession No. 37146), the expression vectors pC4 (ATCC Accession No. 209646) and pC6 (ATCC Accession No. 209647) contain the strong promoter (LTR) of the Rous Sarcoma Virus (Cullen et al., Molecular and Cellular Biology, 438-447 (March, 1985)) plus a fragment of the CMV-enhancer (Boshart et al., Cell 41:521-530 (1985).) Multiple cloning sites, e.g., with the restriction enzyme cleavage sites BamHI, XbaI and Asp718, facilitate the cloning of the gene of interest. The vectors also contain the 3′ intron, the polyadenylation and termination signal of the rat preproinsulin gene, and the mouse DHFR gene under control of the SV40 early promoter.

[0890] Specifically, the plasmid pC6, for example, is digested with appropriate restriction enzymes and then dephosphorylated using calf intestinal phosphates by procedures known in the art. The vector is then isolated from a 1% agarose gel.

[0891] A polynucleotide of the present invention is amplified according to the protocol outlined in Example 1. If a naturally occurring signal sequence is used to produce the polypeptide of the present invention, the vector does not need a second signal peptide. Alternatively, if a naturally occurring signal sequence is not used, the vector can be modified to include a heterologous signal sequence. (See, e.g., WO 96/34891.)

[0892] The amplified fragment is isolated from a 1% agarose gel using a commercially available kit (“Geneclean,” BIO 101 Inc., La Jolla, Calif.). The fragment then is digested with appropriate restriction enzymes and again purified on a 1% agarose gel.

[0893] The amplified fragment is then digested with the same restriction enzyme and purified on a 1% agarose gel. The isolated fragment and the dephosphorylated vector are then ligated with T4 DNA ligase. E. coli HB101 or XL-1 Blue cells are then transformed and bacteria are identified that contain the fragment inserted into plasmid pC6 using, for instance, restriction enzyme analysis.

[0894] Chinese hamster ovary cells lacking an active DHFR gene is used for transfection. Five μg of the expression plasmid pC6 or pC4 is cotransfected with 0.5 μg of the plasmid pSVneo using lipofectin (Felgner et al., supra). The plasmid pSV2-neo contains a dominant selectable marker, the neo gene from Tn5 encoding an enzyme that confers resistance to a group of antibiotics including G418. The cells are seeded in alpha minus MEM supplemented with 1 mg/ml G418. After 2 days, the cells are trypsinized and seeded in hybridoma cloning plates (Greiner, Germany) in alpha minus MEM supplemented with 10, 25, or 50 ng/ml of metothrexate plus 1 mg/ml G418. After about 10-14 days single clones are trypsinized and then seeded in 6-well petri dishes or 10 ml flasks using different concentrations of methotrexate (50 nM, 100 nM, 200 nM, 400 nM, 800 nM). Clones growing at the highest concentrations of methotrexate are then transferred to new 6-well plates containing even higher concentrations of methotrexate (1 μM, 2 μM, 5 μM, 10 mM, 20 mM). The same procedure is repeated until clones are obtained which grow at a concentration of 100-200 μM. Expression of the desired gene product is analyzed, for instance, by SDS-PAGE and Western blot or by reversed phase HPLC analysis.

### Example 9

### Protein Fusions

[0895] The polypeptides of the present invention are preferably fused to other proteins. These fusion proteins can be used for a variety of applications. For example, fusion of the present polypeptides to His-tag, HA-tag, protein A, IgG domains, and maltose binding protein facilitates purification. (See Example 5; see also EP A 394,827; Traunecker, et al., Nature 331:84-86 (1988).) Similarly, fusion to IgG-1, IgG-3, and albumin increases the halflife time in vivo. Nuclear localization signals fused to the polypeptides of the present invention can target the protein to a specific subcellular localization, while covalent heterodimer or homodimers can increase or decrease the activity of a fusion protein. Fusion proteins can also create chimeric molecules having more than one function. Finally, fusion proteins can increase solubility and/or stability of the fused protein compared to the non-fused protein. All of the types of fusion proteins described above can be made by modifying the following protocol, which outlines the fusion of a polypeptide to an IgG molecule, or the protocol described in Example 5.

[0896] Briefly, the human Fc portion of the IgG molecule can be PCR amplified, using primers that span the 5′ and 3′ ends of the sequence described below. These primers also should have convenient restriction enzyme sites that will facilitate cloning into an expression vector, preferably a mammalian expression vector.

[0897] For example, if pC4 (Accession No. 209646) is used, the human Fc portion can be ligated into the BamHI cloning site. Note that the 3′ BamHI site should be destroyed. Next, the vector containing the human Fc portion is re-restricted with BamHI, linearizing the vector, and a polynucleotide of the present invention, isolated by the PCR protocol described in Example 1, is ligated into this BamHI site. Note that the polynucleotide is cloned without a stop codon, otherwise a fusion protein will not be produced.

[0898] If the naturally occurring signal sequence is used to produce the polypeptide of the present invention, pC4 does not need a second signal peptide. Alternatively, if the naturally occurring signal sequence is not used, the vector can be modified to include a heterologous signal sequence. (See, e.g., WO 96/34891.)

[0899] Human IgG Fc region:

| | |
|---|---|
| GGGATCCGGAGCCCAAATCTTCTGACAAAACTC | (SEQ ID NO:1547) |
| ACACATGCCCACCGTGCCCAGCACCTGAATTCG | |
| AGGGTGCACCGTCAGTCTTCCTCTTCCCCCCAA | |
| AACCCAAGGACACCCTCATGATCTCCCGGACTC | |
| CTGAGGTCACATGCGTGGTGGTGGACGTAAGCC | |
| ACGAAGACCCTGAGGTCAAGTTCAACTGGTACG | |
| TGGACGGCGTGGAGGTGCATAATGCCAAGACAA | |
| AGCCGCGGGAGGAGCAGTACAACAGCACGTACC | |
| GTGTGGTCAGCGTCCTCACCGTCCTGCACCAGG | |
| ACTGGCTGAATGGCAAGGAGTACAAGTGCAAGG | |
| TCTCCAACAAAGCCCTCCCAACCCCCATCGAGA | |
| AAACCATCTCCAAAGCCAAAGGGCAGCCCCGAG | |
| AACCACAGGTGTACACCCTGCCCCCATCCCGGG | |
| ATGAGCTGACCAAGAACCAGGTCAGCCTGACCT | |
| GCCTGGTCAAAGGCTTCTATCCAAGCGACATCG | |
| CCGTGGAGTGGGAGAGCAATGGGCAGCCGGAGA | |
| ACAACTACAAGACCACGCCTCCCGTGCTGGACT | |
| CCGACGGCTCCTTCTTCCTCTACAGCAAGCTCA | |
| CCGTGGACAAGAGCAGGTGGCAGCAGGGGAACG | |
| TCTTCTCATGCTCCGTGATGCATGAGGCTCTGC | |
| ACAACCACTACACGCAGAAGAGCCTCTCCCTGT | |
| CTCCGGGTAAATGAGTGCGACGGCCGCGACTCT | |
| AGAGGAT | |

[0900] (SEQ ID NO:1547)

### Example 10

### Production of an Antibody from a Polypeptide

[0901] a) Hybridoma Technology

[0902] The antibodies of the present invention can be prepared by a variety of methods. (See, Current Protocols, Chapter 2.) As one example of such methods, cells expressing polypeptide of the present invention are administered to an animal to induce the production of sera containing polyclonal antibodies. In a preferred method, a preparation of polypeptide of the present invention is prepared and purified to render it substantially free of natural contaminants. Such a preparation is then introduced into an animal in order to produce polyclonal antisera of greater specific activity.

[0903] Monoclonal antibodies specific for polypeptide of the present invention are prepared using hybridoma technology. (Kohler et al., Nature 256:495 (1975); Kohler et al., Eur. J. Immunol. 6:511 (1976); Kohler et al., Eur. J. Immunol. 6:292 (1976); Hammerling et al., in: Monoclonal Antibodies and T-Cell Hybridomas, Elsevier, N.Y., pp. 563-681 (1981)). In general, an animal (preferably a mouse) is immunized with polypeptide of the present invention or, more preferably, with a secreted polypeptide of the present invention-expressing cell. Such polypeptide-expressing cells are cultured in any suitable tissue culture medium, preferably in Earle's modified Eagle's medium supplemented with 10% fetal bovine serum (inactivated at about 56° C.), and supplemented with about 10 g/l of nonessential amino acids, about 1,000 U/ml of penicillin, and about 100 μg/ml of streptomycin.

[0904] The splenocytes of such mice are extracted and fused with a suitable myeloma cell line. Any suitable myeloma cell line may be employed in accordance with the present invention; however, it is preferable to employ the parent myeloma cell line (SP20), available from the ATCC. After fusion, the resulting hybridoma cells are selectively maintained in HAT medium, and then cloned by limiting dilution as described by Wands et al. (Gastroenterology 80:225-232 (1981)). The hybridoma cells obtained through such a selection are then assayed to identify clones which secrete antibodies capable of binding the polypeptide of the present invention.

[0905] Alternatively, additional antibodies capable of binding to polypeptide of the present invention can be produced in a two-step procedure using anti-idiotypic antibodies. Such a method makes use of the fact that antibodies are themselves antigens, and therefore, it is possible to obtain an antibody which binds to a second antibody. In accordance with this method, protein specific antibodies are used to immunize an animal, preferably a mouse. The splenocytes of such an animal are then used to produce hybridoma cells, and the hybridoma cells are screened to identify clones which produce an antibody whose ability to bind to the polypeptide of the present invention-specific antibody can be blocked by polypeptide of the present invention. Such antibodies comprise anti-idiotypic antibodies to the polypeptide of the present invention-specific antibody and are used to immunize an animal to induce formation of further polypeptide of the present invention-specific antibodies.

[0906] For in vivo use of antibodies in humans, an antibody is “humanized”. Such antibodies can be produced using genetic constructs derived from hybridoma cells producing the monoclonal antibodies described above. Methods for producing chimeric and humanized antibodies are known in the art and are discussed herein. (See, for review, Morrison, Science 229:1202 (1985); Oi et al., BioTechniques 4:214 (1986); Cabilly et al., U.S. Pat. No. 4,816,567; Taniguchi et al., EP 171496; Morrison et al., EP 173494; Neuberger et al., WO 8601533; Robinson et al., WO 8702671; Boulianne et al., Nature 312:643 (1984); Neuberger et al., Nature 314:268 (1985).)

[0907] b) Isolation of Antibody Fragments Directed Against Polypeptide of the Present Invention from a Library of scFvs

[0908] Naturally occurring V-genes isolated from human PBLs are constructed into a library of antibody fragments which contain reactivities against polypeptide of the present invention to which the donor may or may not have been exposed (see e.g., U.S. Pat. No. 5,885,793 incorporated herein by reference in its entirety).

[0909] Rescue of the Library. A library of scFvs is constructed from the RNA of human PBLs as described in PCT publication WO 92/01047. To rescue phage displaying antibody fragments, approximately 109 E. coli harboring the phagemid are used to inoculate 50 ml of 2×TY containing 1% glucose and 100 μg/ml of ampicillin (2×TY-AMP-GLU) and grown to an O.D. of 0.8 with shaking. Five ml of this culture is used to innoculate 50 ml of 2×TY-AMP-GLU, 2×108 TU of delta gene 3 helper (M13 delta gene III, see PCT publication WO 92/01047) are added and the culture incubated at 37° C. for 45 minutes without shaking and then at 37° C. for 45 minutes with shaking. The culture is centrifuged at 4000 r.p.m. for 10 min. and the pellet resuspended in 2 liters of 2×TY containing 100 μg/ml ampicillin and 50 ug/ml kanamycin and grown overnight. Phage are prepared as described in PCT publication WO 92/01047.

[0910] M13 delta gene II is prepared as follows: M13 delta gene III helper phage does not encode gene III protein, hence the phage(mid) displaying antibody fragments have a greater avidity of binding to antigen. Infectious M13 delta gene III particles are made by growing the helper phage in cells harboring a pUC19 derivative supplying the wild type gene III protein during phage morphogenesis. The culture is incubated for 1 hour at 37° C. without shaking and then for a further hour at 37° C. with shaking. Cells are spun down (IEC-Centra 8,400 r.p.m. for 10 min), resuspended in 300 ml 2×TY broth containing 100 μg ampicillin/ml and 25 μg kanamycin/ml (2×TY-AMP-KAN) and grown overnight, shaking at 37° C. Phage particles are purified and concentrated from the culture medium by two PEG-precipitations (Sambrook et al., 1990), resuspended in 2 ml PBS and passed through a 0.45 μm filter (Minisart NML; Sartorius) to give a final concentration of approximately 1013 transducing units/ml (ampicillin-resistant clones).

[0911] Panning of the Library. Immunotubes (Nunc) are coated overnight in PBS with 4 ml of either 100 μg/ml or 10 μg/ml of a polypeptide of the present invention. Tubes are blocked with 2% Marvel-PBS for 2 hours at 37° C. and then washed 3 times in PBS. Approximately 1013 TU of phage is applied to the tube and incubated for 30 minutes at room temperature tumbling on an over and under turntable and then left to stand for another 1.5 hours. Tubes are washed 10 times with PBS 0.1% Tween-20 and 10 times with PBS. Phage are eluted by adding 1 ml of 100 mM triethylamine and rotating 15 minutes on an under and over turntable after which the solution is immediately neutralized with 0.5 ml of 1.0M Tris-HCl, pH 7.4. Phage are then used to infect 10 ml of mid-log E. coli TG1 by incubating eluted phage with bacteria for 30 minutes at 37° C. The E. coli are then plated on TYE plates containing 1% glucose and 100 μg/ml ampicillin. The resulting bacterial library is then rescued with delta gene 3 helper phage as described above to prepare phage for a subsequent round of selection. This process is then repeated for a total of 4 rounds of affinity purification with tube-washing increased to 20 times with PBS, 0.1% Tween-20 and 20 times with PBS for rounds 3 and 4.

[0912] Characterization of Binders. Eluted phage from the 3rd and 4th rounds of selection are used to infect E. coli HB 2151 and soluble scFv is produced (Marks, et al., 1991) from single colonies for assay. ELISAs are performed with microtitre plates coated with either 10 pg/ml of the polypeptide of the present invention in 50 mM bicarbonate pH 9.6. Clones positive in ELISA are further characterized by PCR fingerprinting (see, e.g., PCT publication WO 92/01047) and then by sequencing. These ELISA positive clones may also be further characterized by techniques known in the art, such as, for example, epitope mapping, binding affinity, receptor signal transduction, ability to block or competitively inhibit antibody/antigen binding, and competitive agonistic or antagonistic activity.

### Example 11

### Method of Determining Alterations in a Gene Corresponding to a Polynucleotide

[0913] RNA isolated from entire families or individual patients presenting with a phenotype of interest (such as a disease) is be isolated. cDNA is then generated from these RNA samples using protocols known in the art. (See, Sambrook.) The cDNA is then used as a template for PCR, employing primers surrounding regions of interest in SEQ ID NO:X; and/or the nucleotide sequence of the related cDNA in the cDNA clone contained in a deposited library. Suggested PCR conditions consist of 35 cycles at 95 degrees C. for 30 seconds; 60-120 seconds at 52-58 degrees C.; and 60-120 seconds at 70 degrees C., using buffer solutions described in Sidransky et al., Science 252:706 (1991).

[0914] PCR products are then sequenced using primers labeled at their 5′ end with T4 polynucleotide kinase, employing SequiTherm Polymerase. (Epicentre Technologies). The intron-exon borders of selected exons is also determined and genomic PCR products analyzed to confirm the results. PCR products harboring suspected mutations is then cloned and sequenced to validate the results of the direct sequencing.

[0915] PCR products is cloned into T-tailed vectors as described in Holton et al., Nucleic Acids Research, 19:1156 (1991) and sequenced with T7 polymerase (United States Biochemical). Affected individuals are identified by mutations not present in unaffected individuals.

[0916] Genomic rearrangements are also observed as a method of determining alterations in a gene corresponding to a polynucleotide. Genomic clones isolated according to Example 2 are nick-translated with digoxigenindeoxy-uridine 5′-triphosphate (Boehringer Mannheim), and FISH performed as described in Johnson et al., Methods Cell Biol. 35:73-99 (1991). Hybridization with the labeled probe is carried out using a vast excess of human cot-1 DNA for specific hybridization to the corresponding genomic locus.

[0917] Chromosomes are counterstained with 4,6-diamino-2-phenylidole and propidium iodide, producing a combination of C- and R-bands. Aligned images for precise mapping are obtained using a triple-band filter set (Chroma Technology, Brattleboro, Vt.) in combination with a cooled charge-coupled device camera (Photometrics, Tucson, Ariz.) and variable excitation wavelength filters. (Johnson et al., Genet. Anal. Tech. Appl., 8:75 (1991).) Image collection, analysis and chromosomal fractional length measurements are performed using the ISee Graphical Program System. (Inovision Corporation, Durham, N.C.) Chromosome alterations of the genomic region hybridized by the probe are identified as insertions, deletions, and translocations. These alterations are used as a diagnostic marker for an associated disease.

### Example 12

### Method of Detecting Abnormal Levels of a Polypeptide in a Biological Sample

[0918] A polypeptide of the present invention can be detected in a biological sample, and if an increased or decreased level of the polypeptide is detected, this polypeptide is a marker for a particular phenotype. Methods of detection are numerous, and thus, it is understood that one skilled in the art can modify the following assay to fit their particular needs.

[0919] For example, antibody-sandwich ELISAs are used to detect polypeptides in a sample, preferably a biological sample. Wells of a microtiter plate are coated with specific antibodies, at a final concentration of 0.2 to 10 ug/ml. The antibodies are either monoclonal or polyclonal and are produced by the method described in Example 10. The wells are blocked so that non-specific binding of the polypeptide to the well is reduced.

[0920] The coated wells are then incubated for >2 hours at RT with a sample containing the polypeptide. Preferably, serial dilutions of the sample should be used to validate results. The plates are then washed three times with deionized or distilled water to remove unbounded polypeptide.

[0921] Next, 50 ul of specific antibody-alkaline phosphatase conjugate, at a concentration of 25-400 ng, is added and incubated for 2 hours at room temperature. The plates are again washed three times with deionized or distilled water to remove unbounded conjugate.

[0922] Add 75 ul of 4-methylumbelliferyl phosphate (MUP) or p-nitrophenyl phosphate (NPP) substrate solution to each well and incubate 1 hour at room temperature. Measure the reaction by a microtiter plate reader. Prepare a standard curve, using serial dilutions of a control sample, and plot polypeptide concentration on the X-axis (log scale) and fluorescence or absorbance of the Y-axis (linear scale). Interpolate the concentration of the polypeptide in the sample using the standard curve.

### Example 13

### Formulation

[0923] The invention also provides methods of treatment and/or prevention of diseases or disorders (such as, for example, any one or more of the diseases or disorders disclosed herein) by administration to a subject of an effective amount of a Therapeutic. By therapeutic is meant a polynucleotides or polypeptides of the invention (including fragments and variants), agonists or antagonists thereof, and/or antibodies thereto, in combination with a pharmaceutically acceptable carrier type (e.g., a sterile carrier).

[0924] The Therapeutic will be formulated and dosed in a fashion consistent with good medical practice, taking into account the clinical condition of the individual patient (especially the side effects of treatment with the Therapeutic alone), the site of delivery, the method of administration, the scheduling of administration, and other factors known to practitioners. The “effective amount” for purposes herein is thus determined by such considerations.

[0925] As a general proposition, the total pharmaceutically effective amount of the Therapeutic administered parenterally per dose will be in the range of about 1 ug/kg/day to 10 mg/kg/day of patient body weight, although, as noted above, this will be subject to therapeutic discretion. More preferably, this dose is at least 0.01 mg/kg/day, and most preferably for humans between about 0.01 and 1 mg/kg/day for the hormone. If given continuously, the Therapeutic is typically administered at a dose rate of about 1 ug/kg/hour to about 50 ug/kg/hour, either by 1-4 injections per day or by continuous subcutaneous infusions, for example, using a mini-pump. An intravenous bag solution may also be employed. The length of treatment needed to observe changes and the interval following treatment for responses to occur appears to vary depending on the desired effect.

[0926] Therapeutics can be are administered orally, rectally, parenterally, intracistemally, intravaginally, intraperitoneally, topically (as by powders, ointments, gels, drops or transdermal patch), bucally, or as an oral or nasal spray. “Pharmaceutically acceptable carrier” refers to a non-toxic solid, semisolid or liquid filler, diluent, encapsulating material or formulation auxiliary of any. The term “parenteral” as used herein refers to modes of administration which include intravenous, intramuscular, intraperitoneal, intrasternal, subcutaneous and intraarticular injection and infusion.

[0927] Therapeutics of the invention are also suitably administered by sustained-release systems. Suitable examples of sustained-release Therapeutics are administered orally, rectally, parenterally, intracistemally, intravaginally, intraperitoneally, topically (as by powders, ointments, gels, drops or transdermal patch), bucally, or as an oral or nasal spray. “Pharmaceutically acceptable carrier” refers to a non-toxic solid, semisolid or liquid filler, diluent, encapsulating material or formulation auxiliary of any type. The term “parenteral” as used herein refers to modes of administration which include intravenous, intramuscular, intraperitoneal, intrastemal, subcutaneous and intraarticular injection and infusion.

[0928] Therapeutics of the invention are also suitably administered by sustained-release systems. Suitable examples of sustained-release Therapeutics include suitable polymeric materials (such as, for example, semi-permeable polymer matrices in the form of shaped articles, e.g., films, or mirocapsules), suitable hydrophobic materials (for example as an emulsion in an acceptable oil) or ion exchange resins, and sparingly soluble derivatives (such as, for example, a sparingly soluble salt).

[0929] Sustained-release matrices include polylactides (U.S. Pat. No. 3,773,919, EP 58,481), copolymers of L-glutamic acid and gamma-ethyl-L-glutamate (Sidman et al., Biopolymers 22:547-556 (1983)), poly (2-hydroxyethyl methacrylate) (Langer et al., J. Biomed. Mater. Res. 15:167-277 (1981), and Langer, Chem. Tech. 12:98-105 (1982)), ethylene vinyl acetate (Langer et al., Id.) or poly-D-(−)-3-hydroxybutyric acid (EP 133,988).

[0930] Sustained-release Therapeutics also include liposomally entrapped Therapeutics of the invention (see generally, Langer, Science 249:1527-1533 (1990); Treat et al., in Liposomes in the Therapy of Infectious Disease and Cancer, Lopez-Berestein and Fidler (eds.), Liss, New York, pp. 317-327 and 353-365 (1989)). Liposomes containing the Therapeutic are prepared by methods known per se: DE 3,218,121; Epstein et al., Proc. Natl. Acad. Sci. (USA) 82:3688-3692 (1985); Hwang et al., Proc. Natl. Acad. Sci.(USA) 77:4030-4034 (1980); EP 52,322; EP 36,676; EP 88,046; EP 143,949; EP 142,641; Japanese Pat. Appl. 83-118008; U.S. Pat. Nos. 4,485,045 and 4,544,545; and EP 102,324. Ordinarily, the liposomes are of the small (about 200-800 Angstroms) unilamellar type in which the lipid content is greater than about 30 mol. percent cholesterol, the selected proportion being adjusted for the optimal Therapeutic.

[0931] In yet an additional embodiment, the Therapeutics of the invention are delivered by way of a pump (see Langer, supra; Sefton, CRC Crit. Ref. Biomed. Eng. 14:201 (1987); Buchwald et al., Surgery 88:507 (1980); Saudek et al., N. Engl. J. Med. 321:574 (1989)).

[0932] Other controlled release systems are discussed in the review by Langer (Science 249:1527-1533 (1990)).

[0933] For parenteral administration, in one embodiment, the Therapeutic is formulated generally by mixing it at the desired degree of purity, in a unit dosage injectable form (solution, suspension, or emulsion), with a pharmaceutically acceptable carrier, i.e., one that is non-toxic to recipients at the dosages and concentrations employed and is compatible with other ingredients of the formulation. For example, the formulation preferably does not include oxidizing agents and other compounds that are known to be deleterious to the Therapeutic.

[0934] Generally, the formulations are prepared by contacting the Therapeutic uniformly and intimately with liquid carriers or finely divided solid carriers or both. Then, if necessary, the product is shaped into the desired formulation. Preferably the carrier is a parenteral carrier, more preferably a solution that is isotonic with the blood of the recipient. Examples of such carrier vehicles include water, saline, Ringer's solution, and dextrose solution. Non-aqueous vehicles such as fixed oils and ethyl oleate are also useful herein, as well as liposomes.

[0935] The carrier suitably contains minor amounts of additives such as substances that enhance isotonicity and chemical stability. Such materials are non-toxic to recipients at the dosages and concentrations employed, and include buffers such as phosphate, citrate, succinate, acetic acid, and other organic acids or their salts; antioxidants such as ascorbic acid; low molecular weight (less than about ten residues) polypeptides, e.g., polyarginine or tripeptides; proteins, such as serum albumin, gelatin, or immunoglobulins; hydrophilic polymers such as polyvinylpyrrolidone; amino acids, such as glycine, glutamic acid, aspartic acid, or arginine; monosaccharides, disaccharides, and other carbohydrates including cellulose or its derivatives, glucose, manose, or dextrins; chelating agents such as EDTA; sugar alcohols such as mannitol or sorbitol; counterions such as sodium; and/or nonionic surfactants such as polysorbates, poloxamers, or PEG.

[0936] The Therapeutic is typically formulated in such vehicles at a concentration of about 0.1 mg/ml to 100 mg/ml, preferably 1-10 mg/ml, at a pH of about 3 to 8. It will be understood that the use of certain of the foregoing excipients, carriers, or stabilizers will result in the formation of polypeptide salts.

[0937] Any pharmaceutical used for therapeutic administration can be sterile. Sterility is readily accomplished by filtration through sterile filtration membranes (e.g., 0.2 micron membranes). Therapeutics generally are placed into a container having a sterile access port, for example, an intravenous solution bag or vial having a stopper pierceable by a hypodermic injection needle.

[0938] Therapeutics ordinarily will be stored in unit or multi-dose containers, for example, sealed ampoules or vials, as an aqueous solution or as a lyophilized formulation for reconstitution. As an example of a lyophilized formulation, 10-ml vials are filled with 5 ml of sterile-filtered 1% (w/v) aqueous Therapeutic solution, and the resulting mixture is lyophilized. The infusion solution is prepared by reconstituting the lyophilized Therapeutic using bacteriostatic Water-for-Injection.

[0939] The invention also provides a pharmaceutical pack or kit comprising one or more containers filled with one or more of the ingredients of the Therapeutics of the invention. Associated with such container(s) can be a notice in the form prescribed by a governmental agency regulating the manufacture, use or sale of pharmaceuticals or biological products, which notice reflects approval by the agency of manufacture, use or sale for human administration. In addition, the Therapeutics may be employed in conjunction with other therapeutic compounds.

[0940] The Therapeutics of the invention may be administered alone or in combination with adjuvants. Adjuvants that may be administered with the Therapeutics of the invention include, but are not limited to, alum, alum plus deoxycholate (ImmunoAg), MTP-PE (Biocine Corp.), QS21 (Genentech, Inc.), BCG, and MPL. In a specific embodiment, Therapeutics of the invention are administered in combination with alum. In another specific embodiment, Therapeutics of the invention are administered in combination with QS-21. Further adjuvants that may be administered with the Therapeutics of the invention include, but are not limited to, Monophosphoryl lipid immunomodulator, AdjuVax 100a, QS-21, QS-18, CRL1005, Aluminum salts, MF-59, and Virosomal adjuvant technology. Vaccines that may be administered with the Therapeutics of the invention include, but are not limited to, vaccines directed toward protection against MMR (measles, mumps, rubella), polio, varicella, tetanus/diptheria, hepatitis A, hepatitis B, haemophilus influenzae B, whooping cough, pneumonia, influenza, Lyme's Disease, rotavirus, cholera, yellow fever, Japanese encephalitis, poliomyelitis, rabies, typhoid fever, and pertussis. Combinations may be administered either concomitantly, e.g., as an admixture, separately but simultaneously or concurrently; or sequentially. This includes presentations in which the combined agents are administered together as a therapeutic mixture, and also procedures in which the combined agents are administered separately but simultaneously, e.g., as through separate intravenous lines into the same individual. Administration “in combination” further includes the separate administration of one of the compounds or agents given first, followed by the second.

[0941] The Therapeutics of the invention may be administered alone or in combination with other therapeutic agents. Therapeutic agents that may be administered in combination with the Therapeutics of the invention, include but not limited to, other members of the TNF family, chemotherapeutic agents, antibiotics, steroidal and non-steroidal anti-inflammatories, conventional immunotherapeutic agents, cytokines and/or growth factors. Combinations may be administered either concomitantly, e.g., as an admixture, separately but simultaneously or concurrently; or sequentially. This includes presentations in which the combined agents are administered together as a therapeutic mixture, and also procedures in which the combined agents are administered separately but simultaneously, e.g., as through separate intravenous lines into the same individual. Administration “in combination” further includes the separate administration of one of the compounds or agents given first, followed by the second.

[0942] In one embodiment, the Therapeutics of the invention are administered in combination with members of the TNF family. TNF, TNF-related or TNF-like molecules that may be administered with the Therapeutics of the invention include, but are not limited to, soluble forms of TNF-alpha, lymphotoxin-alpha (LT-alpha, also known as TNF-beta), LT-beta (found in complex heterotrimer LT-alpha2-beta), OPGL, FasL, CD27L, CD30L, CD40L, 4-1BBL, DcR3, OX40L, TNF-gamma (International Publication No. WO 96/14328), AIM-I (International Publication No. WO 97/33899), endokine-alpha (International Publication No. WO 98/07880), TR6 (International Publication No. WO 98/30694), OPG, and neutrokine-alpha (International Publication No. WO 98/18921, OX40, and nerve growth factor (NGF), and soluble forms of Fas, CD30, CD27, CD40 and 4-IBB, TR2 (International Publication No. WO 96/34095), DR3 (International Publication No. WO 97/33904), DR4 (International Publication No. WO 98/32856), TR5 (International Publication No. WO 98/30693), TR6 (International Publication No. WO 98/30694), TR7 (International Publication No. WO 98/41629), TRANK, TR9 (International Publication No. WO 98/56892), TR10 (International Publication No. WO 98/54202), 312C2 (International Publication No. WO 98/06842), and TR12, and soluble forms CD154, CD70, and CD153.

[0943] In certain embodiments, Therapeutics of the invention are administered in combination with antiretroviral agents, nucleoside reverse transcriptase inhibitors, non-nucleoside reverse transcriptase inhibitors, and/or protease inhibitors. Nucleoside reverse transcriptase inhibitors that may be administered in combination with the Therapeutics of the invention, include, but are not limited to, RETROVIR™ (zidovudine/AZT), VIDEX™ (didanosine/ddI), HIVID™ (zalcitabine/ddC), ZERIT™ (stavudine/d4T), EPIVIR™ (lamivudine/3TC), and COMBIVIR™ (zidovudine/lamivudine). Non-nucleoside reverse transcriptase inhibitors that may be administered in combination with the Therapeutics of the invention, include, but are not limited to, VIRAMUNE™ (nevirapine), RESCRIPTOR™ (delavirdine), and SUSTIVA™ (efavirenz). Protease inhibitors that may be administered in combination with the Therapeutics of the invention, include, but are not limited to, CRIXIVAN™ (indinavir), NORVIR™ (ritonavir), INVIRASE™ (saquinavir), and VIRACEPT™ (nelfinavir). In a specific embodiment, antiretroviral agents, nucleoside reverse transcriptase inhibitors, non-nucleoside reverse transcriptase inhibitors, and/or protease inhibitors may be used in any combination with Therapeutics of the invention to treat AIDS and/or to prevent or treat HIV infection.

[0944] In other embodiments, Therapeutics of the invention may be administered in combination with anti-opportunistic infection agents. Anti-opportunistic agents that may be administered in combination with the Therapeutics of the invention, include, but are not limited to, TRIMETHOPRIM-SULFAMETHOXAZOLE™, DAPSONE™, PENTAMIDINE™, ATOVAQUONE™, ISONIAZID™, RIFAMPIN™, PYRAZINAMIDE™, ETHAMBUTOL™, RIFABUTIN™, CLARITHROMYCIN™, AZITHROMYCIN™, GANCICLOVIR™, FOSCARNET™, CIDOFOVIR™, FLUCONAZOLE™, ITRACONAZOLE™, KETOCONAZOLE™, ACYCLOVIR™, FAMCICOLVIR™, PYRIMETHAMINE™, LEUCOVORIN™, NEUPOGEN™ (filgrastim/G-CSF), and LEUKINE™ (sargramostim/GM-CSF). In a specific embodiment, Therapeutics of the invention are used in any combination with TRIMETHOPRIM-SULFAMETHOXAZOLE™, DAPSONE™, PENTAMIDINE™, and/or ATOVAQUONE™ to prophylactically treat or prevent an opportunistic Pneumocystis carinii pneumonia infection. In another specific embodiment, Therapeutics of the invention are used in any combination with ISONIAZID™, RIFAMPIN™, PYRAZINAMIDE™, and/or ETHAMBUTOL™ to prophylactically treat or prevent an opportunistic Mycobacterium avium complex infection. In another specific embodiment, Therapeutics of the invention are used in any combination with RIFABUTIN™, CLARITHROMYCIN™, and/or AZITHROMYCIN™ to prophylactically treat or prevent an opportunistic Mycobacterium tuberculosis infection. In another specific embodiment, Therapeutics of the invention are used in any combination with GANCICLOVIR™, FOSCARNET™, and/or CIDOFOVIR™ to prophylactically treat or prevent an opportunistic cytomegalovirus infection. In another specific embodiment, Therapeutics of the invention are used in any combination with FLUCONAZOLE™, ITRACONAZOLE™, and/or KETOCONAZOLE™ to prophylactically treat or prevent an opportunistic fungal infection. In another specific embodiment, Therapeutics of the invention are used in any combination with ACYCLOVIR™ and/or FAMCICOLVIR™ to prophylactically treat or prevent an opportunistic herpes simplex virus type I and/or type II infection. In another specific embodiment, Therapeutics of the invention are used in any combination with PYRIMETHAMINE™ and/or LEUCOVORIN™ to prophylactically treat or prevent an opportunistic Toxoplasma gondii infection. In another specific embodiment, Therapeutics of the invention are used in any combination with LEUCOVORIN™ and/or NEUPOGEN™ to prophylactically treat or prevent an opportunistic bacterial infection.

[0945] In a further embodiment, the Therapeutics of the invention are administered in combination with an antiviral agent. Antiviral agents that may be administered with the Therapeutics of the invention include, but are not limited to, acyclovir, ribavirin, amantadine, and remantidine.

[0946] In a further embodiment, the Therapeutics of the invention are administered in combination with an antibiotic agent. Antibiotic agents that may be administered with the Therapeutics of the invention include, but are not limited to, amoxicillin, beta-lactamases, aminoglycosides, beta-lactam (glycopeptide), beta-lactamases, Clindamycin, chloramphenicol, cephalosporins, ciprofloxacin, ciprofloxacin, erythromycin, fluoroquinolones, macrolides, metronidazole, penicillins, quinolones, rifampin, streptomycin, sulfonamide, tetracyclines, trimethoprim, trimethoprim-sulfamthoxazole, and vancomycin.

[0947] Conventional nonspecific immunosuppressive agents, that may be administered in combination with the Therapeutics of the invention include, but are not limited to, steroids, cyclosporine, cyclosporine analogs, cyclophosphamide methylprednisone, prednisone, azathioprine, FK-506, 15-deoxyspergualin, and other immunosuppressive agents that act by suppressing the function of responding T cells.

[0948] In specific embodiments, Therapeutics of the invention are administered in combination with immunosuppressants. Immunosuppressants preparations that may be administered with the Therapeutics of the invention include, but are not limited to, ORTHOCLONE™ (OKT3), SANDIMMUNE™/NEORAL™/SANGDYA™ (cyclosporin), PROGRAF™ (tacrolimus), CELLCEPT™ (mycophenolate), Azathioprine, glucorticosteroids, and RAPAMUNE™ (sirolimus). In a specific embodiment, immunosuppressants may be used to prevent rejection of organ or bone marrow transplantation.

[0949] In an additional embodiment, Therapeutics of the invention are administered alone or in combination with one or more intravenous immune globulin preparations. Intravenous immune globulin preparations that may be administered with the Therapeutics of the invention include, but not limited to, GAMMAR™, IVEEGAM™, SANDOGLOBULIN™, GAMMAGARD S/D™, and GAMIMUNE™. In a specific embodiment, Therapeutics of the invention are administered in combination with intravenous immune globulin preparations in transplantation therapy (e.g., bone marrow transplant).

[0950] In an additional embodiment, the Therapeutics of the invention are administered alone or in combination with an anti-inflammatory agent. Anti-inflammatory agents that may be administered with the Therapeutics of the invention include, but are not limited to, glucocorticoids and the nonsteroidal anti-inflammatories, aminoarylcarboxylic acid derivatives, arylacetic acid derivatives, arylbutyric acid derivatives, arylcarboxylic acids, arylpropionic acid derivatives, pyrazoles, pyrazolones, salicylic acid derivatives, thiazinecarboxamides, e-acetamidocaproic acid, S-adenosylmethionine, 3-amino-4-hydroxybutyric acid, amixetrine, bendazac, benzydamine, bucolome, difenpiramide, ditazol, emorfazone, guaiazulene, nabumetone, nimesulide, orgotein, oxaceprol, paranyline, perisoxal, pifoxime, proquazone, proxazole, and tenidap.

[0951] In another embodiment, compositions of the invention are administered in combination with a chemotherapeutic agent. Chemotherapeutic agents that may be administered with the Therapeutics of the invention include, but are not limited to, antibiotic derivatives (e.g., doxorubicin, bleomycin, daunorubicin, and dactinomycin); antiestrogens (e.g., tamoxifen); antimetabolites (e.g., fluorouracil, 5-FU, methotrexate, floxuridine, interferon alpha-2b, glutamic acid, plicamycin, mercaptopurine, and 6-thioguanine); cytotoxic agents (e.g., carmustine, BCNU, lomustine, CCNU, cytosine arabinoside, cyclophosphamide, estramustine, hydroxyurea, procarbazine, mitomycin, busulfan, cis-platin, and vincristine sulfate); hormones (e.g., medroxyprogesterone, estramustine phosphate sodium, ethinyl estradiol, estradiol, megestrol acetate, methyltestosterone, diethylstilbestrol diphosphate, chlorotrianisene, and testolactone); nitrogen mustard derivatives (e.g., mephalen, chorambucil, mechlorethamine (nitrogen mustard) and thiotepa); steroids and combinations (e.g., bethamethasone sodium phosphate); and others (e.g., dicarbazine, asparaginase, mitotane, vincristine sulfate, vinblastine sulfate, and etoposide).

[0952] In a specific embodiment, Therapeutics of the invention are administered in combination with CHOP (cyclophosphamide, doxorubicin, vincristine, and prednisone) or any combination of the components of CHOP. In another embodiment, Therapeutics of the invention are administered in combination with Rituximab. In a further embodiment, Therapeutics of the invention are administered with Rituxmab and CHOP, or Rituxmab and any combination of the components of CHOP.

[0953] In an additional embodiment, the Therapeutics of the invention are administered in combination with cytokines. Cytokines that may be administered with the Therapeutics of the invention include, but are not limited to, IL2, IL3, IL4, IL5, IL6, IL7, IL10, IL12, IL13, IL15, anti-CD40, CD40L, IFN-gamma and TNF-alpha. In another embodiment, Therapeutics of the invention may be administered with any interleukin, including, but not limited to, IL-1alpha, IL-1beta, IL-2, IL-3, IL-4, IL-5, IL-6, IL-7, IL-8, IL-9, IL-10, IL-11, IL-12, IL-13, IL-14, IL-15, IL-16, IL-17, IL-18, IL-19, IL-20, and IL-21.

[0954] In an additional embodiment, the Therapeutics of the invention are administered in combination with angiogenic proteins. Angiogenic proteins that may be administered with the Therapeutics of the invention include, but are not limited to, Glioma Derived Growth Factor (GDGF), as disclosed in European Patent Number EP-399816; Platelet Derived Growth Factor-A (PDGF-A), as disclosed in European Patent Number EP-682110; Platelet Derived Growth Factor-B (PDGF-B), as disclosed in European Patent Number EP-282317; Placental Growth Factor (PlGF), as disclosed in International Publication Number WO 92/06194; Placental Growth Factor-2 (PlGF-2), as disclosed in Hauser et al., Growth Factors, 4:259-268 (1993); Vascular Endothelial Growth Factor (VEGF), as disclosed in International Publication Number WO 90/13649; Vascular Endothelial Growth Factor-A (VEGF-A), as disclosed in European Patent Number EP-506477; Vascular Endothelial Growth Factor-2 (VEGF-2), as disclosed in International Publication Number WO 96/39515; Vascular Endothelial Growth Factor B (VEGF-3); Vascular Endothelial Growth Factor B-186 (VEGF-B186), as disclosed in International Publication Number WO 96/26736; Vascular Endothelial Growth Factor-D (VEGF-D), as disclosed in International Publication Number WO 98/02543; Vascular Endothelial Growth Factor-D (VEGF-D), as disclosed in International Publication Number WO 98/07832; and Vascular Endothelial Growth Factor-E (VEGF-E), as disclosed in German Patent Number DE19639601. The above mentioned references are incorporated herein by reference herein.

[0955] In an additional embodiment, the Therapeutics of the invention are administered in combination with hematopoietic growth factors. Hematopoietic growth factors that may be administered with the Therapeutics of the invention include, but are not limited to, LEUKINE™ (SARGRAMOSTIM™) and NEUPOGEN™ (FILGRASTIM™).

[0956] In an additional embodiment, the Therapeutics of the invention are administered in combination with Fibroblast Growth Factors. Fibroblast Growth Factors that may be administered with the Therapeutics of the invention include, but are not limited to, FGF-1, FGF-2, FGF-3, FGF-4, FGF-5, FGF-6, FGF-7, FGF-8, FGF-9, FGF-10, FGF-11, FGF-12, FGF-13, FGF-14, and FGF-15.

[0957] In additional embodiments, the Therapeutics of the invention are administered in combination with other therapeutic or prophylactic regimens, such as, for example, radiation therapy.

### Example 14

### Method of Treating Decreased Levels of the Polypeptide

[0958] The present invention relates to a method for treating an individual in need of an increased level of a polypeptide of the invention in the body comprising administering to such an individual a composition comprising a therapeutically effective amount of an agonist of the invention (including polypeptides of the invention). Moreover, it will be appreciated that conditions caused by a decrease in the standard or normal expression level of a polypeptide of the present invention in an individual can be treated by administering the agonist or antagonist of the present invention. Thus, the invention also provides a method of treatment of an individual in need of an increased level of the polypeptide comprising administering to such an individual a Therapeutic comprising an amount of the agonist or antagonist to increase the activity level of the polypeptide in such an individual.

[0959] For example, a patient with decreased levels of a polypeptide receives a daily dose 0.1-100 ug/kg of the agonist or antagonist for six consecutive days. The exact details of the dosing scheme, based on administration and formulation, are provided in Example 13.

### Example 15

### Method of Treating Increased Levels of the Polypeptide

[0960] The present invention also relates to a method of treating an individual in need of a decreased level of a polypeptide of the invention in the body comprising administering to such an individual a composition comprising a therapeutically effective amount of an antagonist of the invention (including polypeptides and antibodies of the invention).

[0961] In one example, antisense technology is used to inhibit production of a polypeptide of the present invention. This technology is one example of a method of decreasing levels of a polypeptide, due to a variety of etiologies, such as cancer.

[0962] For example, a patient diagnosed with abnormally increased levels of a polypeptide is administered intravenously antisense polynucleotides at 0.5, 1.0, 1.5, 2.0 and 3.0 mg/kg day for 21 days. This treatment is repeated after a 7-day rest period if the treatment was well tolerated. The formulation of the antisense polynucleotide is provided in Example 13.

### Example 16

### Method of Treatment Using Gene Therapy-Ex Vivo

[0963] One method of gene therapy transplants fibroblasts, which are capable of expressing a polypeptide, onto a patient. Generally, fibroblasts are obtained from a subject by skin biopsy. The resulting tissue is placed in tissue-culture medium and separated into small pieces. Small chunks of the tissue are placed on a wet surface of a tissue culture flask, approximately ten pieces are placed in each flask. The flask is turned upside down, closed tight and left at room temperature over night. After 24 hours at room temperature, the flask is inverted and the chunks of tissue remain fixed to the bottom of the flask and fresh media (e.g., Ham's F12 media, with 10% FBS, penicillin and streptomycin) is added. The flasks are then incubated at 37 degree C. for approximately one week.

[0964] At this time, fresh media is added and subsequently changed every several days. After an additional two weeks in culture, a monolayer of fibroblasts emerge. The monolayer is trypsinized and scaled into larger flasks.

[0965] pMV-7 (Kirschmeier, P. T. et al., DNA, 7:219-25 (1988)), flanked by the long terminal repeats of the Moloney murine sarcoma virus, is digested with EcoRI and HindIII and subsequently treated with calf intestinal phosphatase. The linear vector is fractionated on agarose gel and purified, using glass beads.

[0966] The cDNA encoding a polypeptide of the present invention can be amplified using PCR primers which correspond to the 5′ and 3′ end sequences respectively as set forth in Example 1 using primers and having appropriate restriction sites and initiation/stop codons, if necessary. Preferably, the 5′ primer contains an EcoRI site and the 3′ primer includes a HindIII site. Equal quantities of the Moloney murine sarcoma virus linear backbone and the amplified EcoRI and HindIII fragment are added together, in the presence of T4 DNA ligase. The resulting mixture is maintained under conditions appropriate for ligation of the two fragments. The ligation mixture is then used to transform bacteria HB101, which are then plated onto agar containing kanamycin for the purpose of confirming that the vector has the gene of interest properly inserted.

[0967] The amphotropic pA317 or GP+am12 packaging cells are grown in tissue culture to confluent density in Dulbecco's Modified Eagles Medium (DMEM) with 10% calf serum (CS), penicillin and streptomycin. The MSV vector containing the gene is then added to the media and the packaging cells transduced with the vector. The packaging cells now produce infectious viral particles containing the gene (the packaging cells are now referred to as producer cells).

[0968] Fresh media is added to the transduced producer cells, and subsequently, the media is harvested from a 10 cm plate of confluent producer cells. The spent media, containing the infectious viral particles, is filtered through a millipore filter to remove detached producer cells and this media is then used to infect fibroblast cells. Media is removed from a sub-confluent plate of fibroblasts and quickly replaced with the media from the producer cells. This media is removed and replaced with fresh media. If the titer of virus is high, then virtually all fibroblasts will be infected and no selection is required. If the titer is very low, then it is necessary to use a retroviral vector that has a selectable marker, such as neo or his. Once the fibroblasts have been efficiently infected, the fibroblasts are analyzed to determine whether protein is produced.

[0969] The engineered fibroblasts are then transplanted onto the host, either alone or after having been grown to confluence on cytodex 3 microcarrier beads.

### Example 17

### Gene Therapy Using Endogenous Genes Corresponding to Polynucleotides of the Invention

[0970] Another method of gene therapy according to the present invention involves operably associating the endogenous polynucleotide sequence of the invention with a promoter via homologous recombination as described, for example, in U.S. Pat. No. 5,641,670, issued Jun. 24, 1997; International Publication NO: WO 96/29411, published Sep. 26, 1996; International Publication NO: WO 94/12650, published Aug. 4, 1994; Koller et al., Proc. Natl. Acad. Sci. USA, 86:8932-8935 (1989); and Zijlstra et al., Nature, 342:435-438 (1989). This method involves the activation of a gene which is present in the target cells, but which is not expressed in the cells, or is expressed at a lower level than desired.

[0971] Polynucleotide constructs are made which contain a promoter and targeting sequences, which are homologous to the 5′ non-coding sequence of endogenous polynucleotide sequence, flanking the promoter. The targeting sequence will be sufficiently near the 5′ end of the polynucleotide sequence so the promoter will be operably linked to the endogenous sequence upon homologous recombination. The promoter and the targeting sequences can be amplified using PCR. Preferably, the amplified promoter contains distinct restriction enzyme sites on the 5′ and 3′ ends. Preferably, the 3′ end of the first targeting sequence contains the same restriction enzyme site as the 5′ end of the amplified promoter and the 5′ end of the second targeting sequence contains the same restriction site as the 3′ end of the amplified promoter.

[0972] The amplified promoter and the amplified targeting sequences are digested with the appropriate restriction enzymes and subsequently treated with calf intestinal phosphatase. The digested promoter and digested targeting sequences are added together in the presence of T4 DNA ligase. The resulting mixture is maintained under conditions appropriate for ligation of the two fragments. The construct is size fractionated on an agarose gel then purified by phenol extraction and ethanol precipitation.

[0973] In this Example, the polynucleotide constructs are administered as naked polynucleotides via electroporation. However, the polynucleotide constructs may also be administered with transfection-facilitating agents, such as liposomes, viral sequences, viral particles, precipitating agents, etc. Such methods of delivery are known in the art.

[0974] Once the cells are transfected, homologous recombination will take place which results in the promoter being operably linked to the endogenous polynucleotide sequence. This results in the expression of polynucleotide corresponding to the polynucleotide in the cell. Expression may be detected by immunological staining, or any other method known in the art.

[0975] Fibroblasts are obtained from a subject by skin biopsy. The resulting tissue is placed in DMEM+10% fetal calf serum. Exponentially growing or early stationary phase fibroblasts are trypsinized and rinsed from the plastic surface with nutrient medium. An aliquot of the cell suspension is removed for counting, and the remaining cells are subjected to centrifugation. The supernatant is aspirated and the pellet is resuspended in 5 ml of electroporation buffer (20 mM HEPES pH 7.3, 137 mM NaCl, 5 mM KCl, 0.7 mM Na₂ HPO₄, 6 mM dextrose). The cells are recentrifuged, the supernatant aspirated, and the cells resuspended in electroporation buffer containing 1 mg/ml acetylated bovine serum albumin. The final cell suspension contains approximately 3×10⁶ cells/ml. Electroporation should be performed immediately following resuspension.

[0976] Plasmid DNA is prepared according to standard techniques. For example, to construct a plasmid for targeting to the locus corresponding to the polynucleotide of the invention, plasmid pUC18 (MBI Fermentas, Amherst, N.Y.) is digested with HindIII. The CMV promoter is amplified by PCR with an XbaI site on the 5′ end and a BamHI site on the 3′end. Two non-coding sequences are amplified via PCR: one non-coding sequence (fragment 1) is amplified with a HindIII site at the 5′ end and an Xba site at the 3′end; the other non-coding sequence (fragment 2) is amplified with a BamHI site at the 5′end and a HindIII site at the 3′end. The CMV promoter and the fragments (1 and 2) are digested with the appropriate enzymes (CMV promoter—XbaI and BamHI; fragment 1—XbaI; fragment 2—BamHI) and ligated together. The resulting ligation product is digested with HindIII, and ligated with the HindIII-digested pUC18 plasmid.

[0977] Plasmid DNA is added to a sterile cuvette with a 0.4 cm electrode gap (Bio-Rad). The final DNA concentration is generally at least 120 μg/ml. 0.5 ml of the cell suspension (containing approximately 1.5.×10⁶ cells) is then added to the cuvette, and the cell suspension and DNA solutions are gently mixed. Electroporation is performed with a Gene-Pulser apparatus (Bio-Rad). Capacitance and voltage are set at 960 μF and 250-300 V, respectively. As voltage increases, cell survival decreases, but the percentage of surviving cells that stably incorporate the introduced DNA into their genome increases dramatically. Given these parameters, a pulse time of approximately 14-20 mSec should be observed.

[0978] Electroporated cells are maintained at room temperature for approximately 5 min, and the contents of the cuvette are then gently removed with a sterile transfer pipette. The cells are added directly to 10 ml of prewarmed nutrient media (DMEM with 15% calf serum) in a 10 cm dish and incubated at 37 degree C. The following day, the media is aspirated and replaced with 10 ml of fresh media and incubated for a further 16-24 hours.

[0979] The engineered fibroblasts are then injected into the host, either alone or after having been grown to confluence on cytodex 3 microcarrier beads. The fibroblasts now produce the protein product. The fibroblasts can then be introduced into a patient as described above.

### Example 18

### Method of Treatment Using Gene Therapy—In Vivo

[0980] Another aspect of the present invention is using in vivo gene therapy methods to treat disorders, diseases and conditions. The gene therapy method relates to the introduction of naked nucleic acid (DNA, RNA, and antisense DNA or RNA) sequences into an animal to increase or decrease the expression of the polypeptide. The polynucleotide of the present invention may be operatively linked to a promoter or any other genetic elements necessary for the expression of the polypeptide by the target tissue. Such gene therapy and delivery techniques and methods are known in the art, see, for example, WO90/11092, WO98/11779; U.S. Pat. Nos. 5,693,622, 5,705,151, 5,580,859; Tabata et al., Cardiovasc. Res. 35(3):470-479 (1997); Chao et al., Pharmacol. Res. 35(6):517-522 (1997); Wolff, Neuromuscul. Disord. 7(5):314-318 (1997); Schwartz et Gene Ther. 3(5):405-411 (1996); Tsurumi et al., Circulation 94(12):3281-3290 (1996) (incorporated herein by reference).

[0981] The polynucleotide constructs may be delivered by any method that delivers injectable materials to the cells of an animal, such as, injection into the interstitial space of tissues (heart, muscle, skin, lung, liver, intestine and the like). The polynucleotide constructs can be delivered in a pharmaceutically acceptable liquid or aqueous carrier.

[0982] The term “naked” polynucleotide, DNA or RNA, refers to sequences that are free from any delivery vehicle that acts to assist, promote, or facilitate entry into the cell, including viral sequences, viral particles, liposome formulations, lipofectin or precipitating agents and the like. However, the polynucleotides of the present invention may also be delivered in liposome formulations (such as those taught in Felgner P. L. et al. (1995) Ann. NY Acad. Sci. 772:126-139 and Abdallah B. et al. (1995) Biol. Cell 85(1):1-7) which can be prepared by methods well known to those skilled in the art.

[0983] The polynucleotide vector constructs used in the gene therapy method are preferably constructs that will not integrate into the host genome nor will they contain sequences that allow for replication. Any strong promoter known to those skilled in the art can be used for driving the expression of DNA. Unlike other gene therapies techniques, one major advantage of introducing naked nucleic acid sequences into target cells is the transitory nature of the polynucleotide synthesis in the cells. Studies have shown that non-replicating DNA sequences can be introduced into cells to provide production of the desired polypeptide for periods of up to six months.

[0984] The polynucleotide construct can be delivered to the interstitial space of tissues within the an animal, including of muscle, skin, brain, lung, liver, spleen, bone marrow, thymus, heart, lymph, blood, bone, cartilage, pancreas, kidney, gall bladder, stomach, intestine, testis, ovary, uterus, rectum, nervous system, eye, gland, and connective tissue. Interstitial space of the tissues comprises the intercellular fluid, mucopolysaccharide matrix among the reticular fibers of organ tissues, elastic fibers in the walls of vessels or chambers, collagen fibers of fibrous tissues, or that same matrix within connective tissue ensheathing muscle cells or in the lacunae of bone. It is similarly the space occupied by the plasma of the circulation and the lymph fluid of the lymphatic channels. Delivery to the interstitial space of muscle tissue is preferred for the reasons discussed below. They may be conveniently delivered by injection into the tissues comprising these cells. They are preferably delivered to and expressed in persistent, non-dividing cells which are differentiated, although delivery and expression may be achieved in non-differentiated or less completely differentiated cells, such as, for example, stem cells of blood or skin fibroblasts. In vivo muscle cells are particularly competent in their ability to take up and express polynucleotides.

[0985] For the naked polynucleotide injection, an effective dosage amount of DNA or RNA will be in the range of from about 0.05 g/kg body weight to about 50 mg/kg body weight. Preferably the dosage will be from about 0.005 mg/kg to about 20 mg/kg and more preferably from about 0.05 mg/kg to about 5 mg/kg. Of course, as the artisan of ordinary skill will appreciate, this dosage will vary according to the tissue site of injection. The appropriate and effective dosage of nucleic acid sequence can readily be determined by those of ordinary skill in the art and may depend on the condition being treated and the route of administration. The preferred route of administration is by the parenteral route of injection into the interstitial space of tissues. However, other parenteral routes may also be used, such as, inhalation of an aerosol formulation particularly for delivery to lungs or bronchial tissues, throat or mucous membranes of the nose. In addition, naked polynucleotide constructs can be delivered to arteries during angioplasty by the catheter used in the procedure.

[0986] The dose response effects of injected polynucleotide in muscle in vivo is determined as follows. Suitable template DNA for production of mRNA coding for polypeptide of the present invention is prepared in accordance with a standard recombinant DNA methodology. The template DNA, which may be either circular or linear, is either used as naked DNA or complexed with liposomes. The quadriceps muscles of mice are then injected with various amounts of the template DNA.

[0987] Five to six week old female and male Balb/C mice are anesthetized by intraperitoneal injection with 0.3 ml of 2.5% Avertin. A 1.5 cm incision is made on the anterior thigh, and the quadriceps muscle is directly visualized. The template DNA is injected in 0.1 ml of carrier in a 1 cc syringe through a 27 gauge needle over one minute, approximately 0.5 cm from the distal insertion site of the muscle into the knee and about 0.2 cm deep. A suture is placed over the injection site for future localization, and the skin is closed with stainless steel clips.

[0988] After an appropriate incubation time (e.g., 7 days) muscle extracts are prepared by excising the entire quadriceps. Every fifth 15 um cross-section of the individual quadriceps muscles is histochemically stained for protein expression. A time course for protein expression may be done in a similar fashion except that quadriceps from different mice are harvested at different times. Persistence of DNA in muscle following injection may be determined by Southern blot analysis after preparing total cellular DNA and HIRT supernatants from injected and control mice. The results of the above experimentation in mice can be use to extrapolate proper dosages and other treatment parameters in humans and other animals using naked DNA.

### Example 19

### Transgenic Animals

[0989] The polypeptides of the invention can also be expressed in transgenic animals. Animals of any species, including, but not limited to, mice, rats, rabbits, hamsters, guinea pigs, pigs, micro-pigs, goats, sheep, cows and non-human primates, e.g., baboons, monkeys, and chimpanzees may be used to generate transgenic animals. In a specific embodiment, techniques described herein or otherwise known in the art, are used to express polypeptides of the invention in humans, as part of a gene therapy protocol.

[0990] Any technique known in the art may be used to introduce the transgene (i.e., polynucleotides of the invention) into animals to produce the founder lines of transgenic animals. Such techniques include, but are not limited to, pronuclear microinjection (Paterson et al., Appl. Microbiol. Biotechnol. 40:691-698 (1994); Carver et al., Biotechnology (NY) 11:1263-1270 (1993); Wright et al., Biotechnology (NY) 9:830-834 (1991); and Hoppe et al., U.S. Pat. No. 4,873,191 (1989)); retrovirus mediated gene transfer into germ lines (Van der Putten et al., Proc. Natl. Acad. Sci., USA 82:6148-6152 (1985)), blastocysts or embryos; gene targeting in embryonic stem cells (Thompson et al., Cell 56:313-321 (1989)); electroporation of cells or embryos (Lo, 1983, Mol Cell. Biol. 3:1803-1814 (1983)); introduction of the polynucleotides of the invention using a gene gun (see, e.g., Ulmer et al., Science 259:1745 (1993); introducing nucleic acid constructs into embryonic pleuripotent stem cells and transferring the stem cells back into the blastocyst; and sperm-mediated gene transfer (Lavitrano et al., Cell 57:717-723 (1989); etc. For a review of such techniques, see Gordon, “Transgenic Animals,” Intl. Rev. Cytol. 115:171-229 (1989), which is incorporated by reference herein in its entirety.

[0991] Any technique known in the art may be used to produce transgenic clones containing polynucleotides of the invention, for example, nuclear transfer into enucleated oocytes of nuclei from cultured embryonic, fetal, or adult cells induced to quiescence (Campell et al., Nature 380:64-66 (1996); Wilmut et al., Nature 385:810-813 (1997)).

[0992] The present invention provides for transgenic animals that carry the transgene in all their cells, as well as animals which carry the transgene in some, but not all their cells, i.e., mosaic animals or chimeric. The transgene may be integrated as a single transgene or as multiple copies such as in concatamers, e.g., head-to-head tandems or head-to-tail tandems. The transgene may also be selectively introduced into and activated in a particular cell type by following, for example, the teaching of Lasko et al. (Lasko et al., Proc. Natl. Acad. Sci. USA 89:6232-6236 (1992)). The regulatory sequences required for such a cell-type specific activation will depend upon the particular cell type of interest, and will be apparent to those of skill in the art. When it is desired that the polynucleotide transgene be integrated into the chromosomal site of the endogenous gene, gene targeting is preferred. Briefly, when such a technique is to be utilized, vectors containing some nucleotide sequences homologous to the endogenous gene are designed for the purpose of integrating, via homologous recombination with chromosomal sequences, into and disrupting the function of the nucleotide sequence of the endogenous gene. The transgene may also be selectively introduced into a particular cell type, thus inactivating the endogenous gene in only that cell type, by following, for example, the teaching of Gu et al. (Gu et al., Science 265:103-106 (1994)). The regulatory sequences required for such a cell-type specific inactivation will depend upon the particular cell type of interest, and will be apparent to those of skill in the art.

[0993] Once transgenic animals have been generated, the expression of the recombinant gene may be assayed utilizing standard techniques. Initial screening may be accomplished by Southern blot analysis or PCR techniques to analyze animal tissues to verify that integration of the transgene has taken place. The level of mRNA expression of the transgene in the tissues of the transgenic animals may also be assessed using techniques which include, but are not limited to, Northern blot analysis of tissue samples obtained from the animal, in situ hybridization analysis, and reverse transcriptase-PCR (rt-PCR). Samples of transgenic gene-expressing tissue may also be evaluated immunocytochemically or immunohistochemically using antibodies specific for the transgene product.

[0994] Once the founder animals are produced, they may be bred, inbred, outbred, or crossbred to produce colonies of the particular animal. Examples of such breeding strategies include, but are not limited to: outbreeding of founder animals with more than one integration site in order to establish separate lines; inbreeding of separate lines in order to produce compound transgenics that express the transgene at higher levels because of the effects of additive expression of each transgene; crossing of heterozygous transgenic animals to produce animals homozygous for a given integration site in order to both augment expression and eliminate the need for screening of animals by DNA analysis; crossing of separate homozygous lines to produce compound heterozygous or homozygous lines; and breeding to place the transgene on a distinct background that is appropriate for an experimental model of interest.

[0995] Transgenic animals of the invention have uses which include, but are not limited to, animal model systems useful in elaborating the biological function of polypeptides of the present invention, studying conditions and/or disorders associated with aberrant expression, and in screening for compounds effective in ameliorating such conditions and/or disorders.

### Example 20

### Knock-Out Animals

[0996] Endogenous gene expression can also be reduced by inactivating or “knocking out” the gene and/or its promoter using targeted homologous recombination. (E.g., see Smithies et al., Nature 317:230-234 (1985); Thomas & Capecchi, Cell 51:503-512 (1987); Thompson et al., Cell 5:313-321 (1989); each of which is incorporated by reference herein in its entirety). For example, a mutant, non-functional polynucleotide of the invention (or a completely unrelated DNA sequence) flanked by DNA homologous to the endogenous polynucleotide sequence (either the coding regions or regulatory regions of the gene) can be used, with or without a selectable marker and/or a negative selectable marker, to transfect cells that express polypeptides of the invention in vivo. In another embodiment, techniques known in the art are used to generate knockouts in cells that contain, but do not express the gene of interest. Insertion of the DNA construct, via targeted homologous recombination, results in inactivation of the targeted gene. Such approaches are particularly suited in research and agricultural fields where modifications to embryonic stem cells can be used to generate animal offspring with an inactive targeted of gene (e.g., see Thomas & Capecchi 1987 and Thompson 1989, supra). However this approach can be routinely adapted for use in humans provided the recombinant DNA constructs are directly administered or targeted to the required site in vivo using appropriate viral vectors that will be apparent to those of skill in the art.

[0997] In further embodiments of the invention, cells that are genetically engineered to express the polypeptides of the invention, or alternatively, that are genetically engineered not to express the polypeptides of the invention (e.g., knockouts) are administered to a patient in vivo. Such cells may be obtained from the patient (i.e., animal, including human) or an MHC compatible donor and can include, but are not limited to fibroblasts, bone marrow cells, blood cells (e.g., lymphocytes), adipocytes, muscle cells, endothelial cells etc. The cells are genetically engineered in vitro using recombinant DNA techniques to introduce the coding sequence of polypeptides of the invention into the cells, or alternatively, to disrupt the coding sequence and/or endogenous regulatory sequence associated with the polypeptides of the invention, e.g., by transduction (using viral vectors, and preferably vectors that integrate the transgene into the cell genome) or transfection procedures, including, but not limited to, the use of plasmids, cosmids, YACs, naked DNA, electroporation, liposomes, etc. The coding sequence of the polypeptides of the invention can be placed under the control of a strong constitutive or inducible promoter or promoter/enhancer to achieve expression, and preferably secretion, of the polypeptides of the invention. The engineered cells which express and preferably secrete the polypeptides of the invention can be introduced into the patient systemically, e.g., in the circulation, or intraperitoneally.

[0998] Alternatively, the cells can be incorporated into a matrix and implanted in the body, e.g., genetically engineered fibroblasts can be implanted as part of a skin graft; genetically engineered endothelial cells can be implanted as part of a lymphatic or vascular graft. (See, for example, Anderson et al. U.S. Pat. No. 5,399,349; and Mulligan & Wilson, U.S. Pat. No. 5,460,959 each of which is incorporated by reference herein in its entirety).

[0999] When the cells to be administered are non-autologous or non-MHC compatible cells, they can be administered using well known techniques which prevent the development of a host immune response against the introduced cells. For example, the cells may be introduced in an encapsulated form which, while allowing for an exchange of components with the immediate extracellular environment, does not allow the introduced cells to be recognized by the host immune system.

[1000] Transgenic and “knock-out” animals of the invention have uses which include, but are not limited to, animal model systems useful in elaborating the biological function of polypeptides of the present invention, studying conditions and/or disorders associated with aberrant expression, and in screening for compounds effective in ameliorating such conditions and/or disorders.

### Example 21

### Assays Detecting Stimulation or Inhibition of B cell Proliferation and Differentiation

[1001] Generation of functional humoral immune responses requires both soluble and cognate signaling between B-lineage cells and their microenvironment. Signals may impart a positive stimulus that allows a B-lineage cell to continue its programmed development, or a negative stimulus that instructs the cell to arrest its current developmental pathway. To date, numerous stimulatory and inhibitory signals have been found to influence B cell responsiveness including IL-2, IL-4, IL-5, IL-6, IL-7, IL10, IL-13, IL-14 and IL-15. Interestingly, these signals are by themselves weak effectors but can, in combination with various co-stimulatory proteins, induce activation, proliferation, differentiation, homing, tolerance and death among B cell populations.

[1002] One of the best studied classes of B-cell co-stimulatory proteins is the TNF-superfamily. Within this family CD40, CD27, and CD30 along with their respective ligands CD154, CD70, and CD153 have been found to regulate a variety of immune responses. Assays which allow for the detection and/or observation of the proliferation and differentiation of these B-cell populations and their precursors are valuable tools in determining the effects various proteins may have on these B-cell populations in terms of proliferation and differentiation. Listed below are two assays designed to allow for the detection of the differentiation, proliferation, or inhibition of B-cell populations and their precursors.

[1003] In Vitro Assay-Agonists or antagonists of the invention can be assessed for its ability to induce activation, proliferation, differentiation or inhibition and/or death in B-cell populations and their precursors. The activity of the agonists or antagonists of the invention on purified human tonsillar B cells, measured qualitatively over the dose range from 0.1 to 10,000 ng/mL, is assessed in a standard B-lymphocyte co-stimulation assay in which purified tonsillar B cells are cultured in the presence of either formalin-fixed Staphylococcus aureus Cowan I (SAC) or immobilized anti-human IgM antibody as the priming agent. Second signals such as IL-2 and IL-15 synergize with SAC and IgM crosslinking to elicit B cell proliferation as measured by tritiated-thymidine incorporation. Novel synergizing agents can be readily identified using this assay. The assay involves isolating human tonsillar B cells by magnetic bead (MACS) depletion of CD3-positive cells. The resulting cell population is greater than 95% B cells as assessed by expression of CD45R(B220).

[1004] Various dilutions of each sample are placed into individual wells of a 96-well plate to which are added 10⁵ B-cells suspended in culture medium (RPMI 1640 containing 10% FBS, 5×10⁻⁵M 2ME, 100 U/ml penicillin, 10 ug/ml streptomycin, and 10⁻⁵ dilution of SAC) in a total volume of 150 ul. Proliferation or inhibition is quantitated by a 20 h pulse (1 uCi/well) with 3H-thymidine (6.7 Ci/mM) beginning 72 h post factor addition. The positive and negative controls are IL2 and medium respectively.

[1005] In Vivo Assay—BALB/c mice are injected (i.p.) twice per day with buffer only, or 2 mg/Kg of agonists or antagonists of the invention, or truncated forms thereof. Mice receive this treatment for 4 consecutive days, at which time they are sacrificed and various tissues and serum collected for analyses. Comparison of H&E sections from normal spleens and spleens treated with agonists or antagonists of the invention identify the results of the activity of the agonists or antagonists on spleen cells, such as the diffusion of peri-arterial lymphatic sheaths, and/or significant increases in the nucleated cellularity of the red pulp regions, which may indicate the activation of the differentiation and proliferation of B-cell populations. Immunohistochemical studies using a B cell marker, anti-CD45R(B220), are used to determine whether any physiological changes to splenic cells, such as splenic disorganization, are due to increased B-cell representation within loosely defined B-cell zones that infiltrate established T-cell regions.

[1006] Flow cytometric analyses of the spleens from mice treated with agonist or antagonist is used to indicate whether the agonists or antagonists specifically increases the proportion of ThB+, CD45R(B220)dull B cells over that which is observed in control mice.

[1007] Likewise, a predicted consequence of increased mature B-cell representation in vivo is a relative increase in serum Ig titers. Accordingly, serum IgM and IgA levels are compared between buffer and agonists or antagonists-treated mice.

[1008] The studies described in this example tested activity of agonists or antagonists of the invention. However, one skilled in the art could easily modify the exemplified studies to test the activity of polynucleotides or polypeptides of the invention (e.g., gene therapy).

### Example 22

### T Cell Proliferation Assay

[1009] A CD3-induced proliferation assay is performed on PBMCs and is measured by the uptake of ³H-thymidine. The assay is performed as follows. Ninety-six well plates are coated with 100 μl/well of mAb to CD3 (HIT3a, Pharmingen) or isotype-matched control mAb (B33.1) overnight at 4 degrees C. (1 μg/ml in 0.05M bicarbonate buffer, pH 9.5), then washed three times with PBS. PBMC are isolated by F/H gradient centrifugation from human peripheral blood and added to quadruplicate wells (5×10⁴/well) of mAb coated plates in RPMI containing 10% FCS and P/S in the presence of varying concentrations of agonists or antagonists of the invention (total volume 200 ul). Relevant protein buffer and medium alone are controls. After 48 hr. culture at 37 degrees C., plates are spun for 2 min. at 1000 rpm and 100 μl of supernatant is removed and stored −20 degrees C. for measurement of IL-2 (or other cytokines) if effect on proliferation is observed. Wells are supplemented with 100 ul of medium containing 0.5 uCi of ³H-thymidine and cultured at 37 degrees C. for 18-24 hr. Wells are harvested and incorporation of ³H-thymidine used as a measure of proliferation. Anti-CD3 alone is the positive control for proliferation. IL-2 (100 U/ml) is also used as a control which enhances proliferation. Control antibody which does not induce proliferation of T cells is used as the negative controls for the effects of agonists or antagonists of the invention.

[1010] The studies described in this example tested activity of agonists or antagonists of the invention. However, one skilled in the art could easily modify the exemplified studies to test the activity of polynucleotides or polypeptides of the invention (e.g., gene therapy).

### Example 23

### Effect of Agonists or Antagonists of the Invention on the Expression of MHC Class II, Costimulatory and Adhesion Molecules and Cell Differentiation of Monocytes and Monocyte-Derived Human Dendritic Cells

[1011] Dendritic cells are generated by the expansion of proliferating precursors found in the peripheral blood: adherent PBMC or elutriated monocytic fractions are cultured for 7-10 days with GM-CSF (50 ng/ml) and IL-4 (20 ng/ml). These dendritic cells have the characteristic phenotype of immature cells (expression of CD1, CD80, CD86, CD40 and MHC class II antigens). Treatment with activating factors, such as TNF-α, causes a rapid change in surface phenotype (increased expression of MHC class I and II, costimulatory and adhesion molecules, downregulation of FCγRII, upregulation of CD83). These changes correlate with increased antigen-presenting capacity and with functional maturation of the dendritic cells.

[1012] FACS analysis of surface antigens is performed as follows. Cells are treated 1-3 days with increasing concentrations of agonist or antagonist of the invention or LPS (positive control), washed with PBS containing 1% BSA and 0.02 mM sodium azide, and then incubated with 1:20 dilution of appropriate FITC- or PE-labeled monoclonal antibodies for 30 minutes at 4 degrees C. After an additional wash, the labeled cells are analyzed by flow cytometry on a FACScan (Becton Dickinson).

[1013] Effect on the production of catokines. Cytokines generated by dendritic cells, in particular IL-12, are important in the initiation of T-cell dependent immune responses. IL-12 strongly influences the development of Th1 helper T-cell immune response, and induces cytotoxic T and NK cell function. An ELISA is used to measure the IL-12 release as follows. Dendritic cells (10⁶/ml) are treated with increasing concentrations of agonists or antagonists of the invention for 24 hours. LPS (100 ng/ml) is added to the cell culture as positive control. Supernatants from the cell cultures are then collected and analyzed for IL-12 content using commercial ELISA kit (e.g., R & D Systems (Minneapolis, Minn.)). The standard protocols provided with the kits are used.

[1014] Effect on the expression of MHC Class II, costimulatory and adhesion molecules. Three major families of cell surface antigens can be identified on monocytes: adhesion molecules, molecules involved in antigen presentation, and Fc receptor. Modulation of the expression of MHC class II antigens and other costimulatory molecules, such as B7 and ICAM-1, may result in changes in the antigen presenting capacity of monocytes and ability to induce T cell activation. Increase expression of Fc receptors may correlate with improved monocyte cytotoxic activity, cytokine release and phagocytosis.

[1015] FACS analysis is used to examine the surface antigens as follows. Monocytes are treated 1-5 days with increasing concentrations of agonists or antagonists of the invention or LPS (positive control), washed with PBS containing 1% BSA and 0.02 mM sodium azide, and then incubated with 1:20 dilution of appropriate FITC- or PE-labeled monoclonal antibodies for 30 minutes at 4 degrees C. After an additional wash, the labeled cells are analyzed by flow cytometry on a FACScan (Becton Dickinson).

[1016] Monocyte activation and/or increased survival. Assays for molecules that activate (or alternatively, inactivate) monocytes and/or increase monocyte survival (or alternatively, decrease monocyte survival) are known in the art and may routinely be applied to determine whether a molecule of the invention functions as an inhibitor or activator of monocytes. Agonists or antagonists of the invention can be screened using the three assays described below. For each of these assays, Peripheral blood mononuclear cells (PBMC) are purified from single donor leukopacks (American Red Cross, Baltimore, Md.) by centrifugation through a Histopaque gradient (Sigma). Monocytes are isolated from PBMC by counterflow centrifugal elutriation.

[1017] Monocyte Survival Assay. Human peripheral blood monocytes progressively lose viability when cultured in absence of serum or other stimuli. Their death results from internally regulated process (apoptosis). Addition to the culture of activating factors, such as TNF-alpha dramatically improves cell survival and prevents DNA fragmentation. Propidium iodide (PI) staining is used to measure apoptosis as follows. Monocytes are cultured for 48 hours in polypropylene tubes in serum-free medium (positive control), in the presence of 100 ng/ml TNF-alpha (negative control), and in the presence of varying concentrations of the compound to be tested. Cells are suspended at a concentration of 2×10⁶/ml in PBS containing PI at a final concentration of 5 μg/ml, and then incubated at room temperature for 5 minutes before FACScan analysis. PI uptake has been demonstrated to correlate with DNA fragmentation in this experimental paradigm.

[1018] Effect on cytokine release. An important function of monocytes/macrophages is their regulatory activity on other cellular populations of the immune system through the release of cytokines after stimulation. An ELISA to measure cytokine release is performed as follows. Human monocytes are incubated at a density of 5×10⁵ cells/ml with increasing concentrations of agonists or antagonists of the invention and under the same conditions, but in the absence of agonists or antagonists. For IL-12 production, the cells are primed overnight with IFN (100 U/ml) in presence of agonist or antagonist of the invention. LPS (10 ng/ml) is then added. Conditioned media are collected after 24 h and kept frozen until use. Measurement of TNF-alpha, IL-10, MCP-1 and IL-8 is then performed using a commercially available ELISA kit (e.g., R & D Systems (Minneapolis, Minn.)) and applying the standard protocols provided with the kit.

[1019] Oxidative burst. Purified monocytes are plated in 96-w plate at 2-1×10⁵ cell/well. Increasing concentrations of agonists or antagonists of the invention are added to the wells in a total volume of 0.2 ml culture medium (RPMI 1640+10% FCS, glutamine and antibiotics). After 3 days incubation, the plates are centrifuged and the medium is removed from the wells. To the macrophage monolayers, 0.2 ml per well of phenol red solution (140 mM NaCl, 10 mM potassium phosphate buffer pH 7.0, 5.5 mM dextrose, 0.56 mM phenol red and 19 U/ml of HRPO) is added, together with the stimulant (200 nM PMA). The plates are incubated at 37° C. for 2 hours and the reaction is stopped by adding 20 μl 1N NaOH per well. The absorbance is read at 610 nm. To calculate the amount of H₂O₂ produced by the macrophages, a standard curve of a H₂O₂ solution of known molarity is performed for each experiment.

[1020] The studies described in this example tested activity of agonists or antagonists of the invention. However, one skilled in the art could easily modify the exemplified studies to test the activity of polynucleotides or polypeptides of the invention (e.g., gene therapy).

### Example 24

### Biological Effects of Agonists or Antagonists of the Invention

[1021] Astrocyte and Neuronal Assays

[1022] Agonists or antagonists of the invention, expressed in Escherichia coli and purified as described above, can be tested for activity in promoting the survival, neurite outgrowth, or phenotypic differentiation of cortical neuronal cells and for inducing the proliferation of glial fibrillary acidic protein immunopositive cells, astrocytes. The selection of cortical cells for the bioassay is based on the prevalent expression of FGF-1 and FGF-2 in cortical structures and on the previously reported enhancement of cortical neuronal survival resulting from FGF-2 treatment. A thymidine incorporation assay, for example, can be used to elucidate an agonist or antagonist of the invention's activity on these cells.

[1023] Moreover, previous reports describing the biological effects of FGF-2 (basic FGF) on cortical or hippocampal neurons in vitro have demonstrated increases in both neuron survival and neurite outgrowth (Walicke et al., “Fibroblast growth factor promotes survival of dissociated hippocampal neurons and enhances neurite extension.” Proc. Natl. Acad. Sci. USA 83:3012-3016. (1986), assay herein incorporated by reference in its entirety). However, reports from experiments done on PC-12 cells suggest that these two responses are not necessarily synonymous and may depend on not only which FGF is being tested but also on which receptor(s) are expressed on the target cells. Using the primary cortical neuronal culture paradigm, the ability of an agonist or antagonist of the invention to induce neurite outgrowth can be compared to the response achieved with FGF-2 using, for example, a thymidine incorporation assay.

[1024] Fibroblast and Endothelial Cell Assays

[1025] Human lung fibroblasts are obtained from Clonetics (San Diego, Calif.) and maintained in growth media from Clonetics. Dermal microvascular endothelial cells are obtained from Cell Applications (San Diego, Calif.). For proliferation assays, the human lung fibroblasts and dermal microvascular endothelial cells can be cultured at 5,000 cells/well in a 96-well plate for one day in growth medium. The cells are then incubated for one day in 0.1% BSA basal medium. After replacing the medium with fresh 0.1% BSA medium, the cells are incubated with the test proteins for 3 days. Alamar Blue (Alamar Biosciences, Sacramento, Calif.) is added to each well to a final concentration of 10%. The cells are incubated for 4 hr. Cell viability is measured by reading in a CytoFluor fluorescence reader. For the PGE₂ assays, the human lung fibroblasts are cultured at 5,000 cells/well in a 96-well plate for one day. After a medium change to 0.1% BSA basal medium, the cells are incubated with FGF-2 or agonists or antagonists of the invention with or without IL-1α for 24 hours. The supernatants are collected and assayed for PGE₂ by EIA kit (Cayman, Ann Arbor, Mich.). For the IL-6 assays, the human lung fibroblasts are cultured at 5,000 cells/well in a 96-well plate for one day. After a medium change to 0.1% BSA basal medium, the cells are incubated with FGF-2 or with or without agonists or antagonists of the invention IL-1α for 24 hours. The supernatants are collected and assayed for IL-6 by ELISA kit (Endogen, Cambridge, Mass.).

[1026] Human lung fibroblasts are cultured with FGF-2 or agonists or antagonists of the invention for 3 days in basal medium before the addition of Alamar Blue to assess effects on growth of the fibroblasts. FGF-2 should show a stimulation at 10-2500 ng/ml which can be used to compare stimulation with agonists or antagonists of the invention.

[1027] Parkinson Models

[1028] The loss of motor function in Parkinson's disease is attributed to a deficiency of striatal dopamine resulting from the degeneration of the nigrostriatal dopaminergic projection neurons. An animal model for Parkinson's that has been extensively characterized involves the systemic administration of 1-methyl-4 phenyl 1,2,3,6-tetrahydropyridine (MPTP). In the CNS, MPTP is taken-up by astrocytes and catabolized by monoamine oxidase B to 1-methyl-4-phenyl pyridine (MPP⁺) and released. Subsequently, MPP⁺ is actively accumulated in dopaminergic neurons by the high-affinity reuptake transporter for dopamine. MPP⁺ is then concentrated in mitochondria by the electrochemical gradient and selectively inhibits nicotidamide adenine disphosphate: ubiquinone oxidoreductionase (complex I), thereby interfering with electron transport and eventually generating oxygen radicals.

[1029] It has been demonstrated in tissue culture paradigms that FGF-2 (basic FGF) has trophic activity towards nigral dopaminergic neurons (Ferrari et al., Dev. Biol. 1989). Recently, Dr. Unsicker's group has demonstrated that administering FGF-2 in gel foam implants in the striatum results in the near complete protection of nigral dopaminergic neurons from the toxicity associated with MPTP exposure (Otto and Unsicker, J. Neuroscience, 1990).

[1030] Based on the data with FGF-2, agonists or antagonists of the invention can be evaluated to determine whether it has an action similar to that of FGF-2 in enhancing dopaminergic neuronal survival in vitro and it can also be tested in vivo for protection of dopaminergic neurons in the striatum from the damage associated with MPTP treatment. The potential effect of an agonist or antagonist of the invention is first examined in vitro in a dopaminergic neuronal cell culture paradigm. The cultures are prepared by dissecting the midbrain floor plate from gestation day 14 Wistar rat embryos. The tissue is dissociated with trypsin and seeded at a density of 200,000 cells/cm² on polyorthinine-laminin coated glass coverslips. The cells are maintained in Dulbecco's Modified Eagle's medium and F12 medium containing hormonal supplements (N1). The cultures are fixed with paraformaldehyde after 8 days in vitro and are processed for tyrosine hydroxylase, a specific marker for dopminergic neurons, immunohistochemical staining. Dissociated cell cultures are prepared from embryonic rats. The culture medium is changed every third day and the factors are also added at that time.

[1031] Since the dopaminergic neurons are isolated from animals at gestation day 14, a developmental time which is past the stage when the dopaminergic precursor cells are proliferating, an increase in the number of tyrosine hydroxylase immunopositive neurons would represent an increase in the number of dopaminergic neurons surviving in vitro. Therefore, if an agonist or antagonist of the invention acts to prolong the survival of dopaminergic neurons, it would suggest that the agonist or antagonist may be involved in Parkinson's Disease.

[1032] The studies described in this example tested activity of agonists or antagonists of the invention. However, one skilled in the art could easily modify the exemplified studies to test the activity of polynucleotides or polypeptides of the invention (e.g., gene therapy).

### Example 25

### The Effect of Agonists or Antagonists of the Invention on the Growth of Vascular Endothelial Cells

[1033] On day 1, human umbilical vein endothelial cells (HUVEC) are seeded at 2-5×10⁴ cells/35 mm dish density in M199 medium containing 4% fetal bovine serum (FBS), 16 units/ml heparin, and 50 units/ml endothelial cell growth supplements (ECGS, Biotechnique, Inc.). On day 2, the medium is replaced with M199 containing 10% FBS, 8 units/ml heparin. An agonist or antagonist of the invention, and positive controls, such as VEGF and basic FGF (bFGF) are added, at varying concentrations. On days 4 and 6, the medium is replaced. On day 8, cell number is determined with a Coulter Counter.

[1034] An increase in the number of HUVEC cells indicates that the compound of the invention may proliferate vascular endothelial cells, while a decrease in the number of HUVEC cell indicates that the compound of the invention inhibits vascular endothelial cells.

[1035] The studies described in this example tested activity of a polypeptide of the invention. However, one skilled in the art could easily modify the exemplified studies to test the activity of polynucleotides (e.g., gene therapy), agonists, and/or antagonists of the invention.

### Example 26

### Rat Corneal Wound Healing Model

[1036] This animal model shows the effect of an agonist or antagonist of the invention on neovascularization. The experimental protocol includes:

[1037] a) Making a 1-1.5 mm long incision from the center of cornea into the stromal layer.

[1038] b) Inserting a spatula below the lip of the incision facing the outer corner of the eye.

[1039] c) Making a pocket (its base is 1-1.5 mm form the edge of the eye).

[1040] d) Positioning a pellet, containing 50 ng-5 ug of an agonist or antagonist of the within the pocket.

[1041] e) Treatment with an agonist or antagonist of the invention can also be applied topically to the corneal wounds in a dosage range of 20 mg-500 mg (daily treatment for five days).

[1042] The studies described in this example tested activity of agonists or antagonists of the invention. However, one skilled in the art could easily modify the exemplified studies to test the activity of polynucleotides or polypeptides of the invention (e.g., gene therapy).

### Example 27

### Diabetic Mouse and Glucocorticoid-Impaired Wound Healing Models

[1043] A. Diabetic db+/db+ Mouse Model

[1044] To demonstrate that an agonist or antagonist of the invention accelerates the healing process, the genetically diabetic mouse model of wound healing is used. The full thickness wound healing model in the db+/db+ mouse is a well characterized, clinically relevant and reproducible model of impaired wound healing. Healing of the diabetic wound is dependent on formation of granulation tissue and re-epithelialization rather than contraction (Gartner, M. H. et al., J. Surg. Res. 52:389 (1992); Greenhalgh, D. G. et al., Am. J. Pathol. 136:1235 (1990)).

[1045] The diabetic animals have many of the characteristic features observed in Type II diabetes mellitus. Homozygous (db+/db+) mice are obese in comparison to their normal heterozygous (db+/+m) littermates. Mutant diabetic (db+/db+) mice have a single autosomal recessive mutation on chromosome 4 (db+) (Coleman et al. Proc. Natl. Acad. Sci. USA 77:283-293 (1982)). Animals show polyphagia, polydipsia and polyuria. Mutant diabetic mice (db+/db+) have elevated blood glucose, increased or normal insulin levels, and suppressed cell-mediated immunity (Mandel et al., J. Immunol. 120:1375 (1978); Debray-Sachs, M. et al., Clin. Exp. Immunol. 51(1):1-7 (1983); Leiter et al., Am. J. of Pathol. 114:46-55 (1985)). Peripheral neuropathy, myocardial complications, and microvascular lesions, basement membrane thickening and glomerular filtration abnormalities have been described in these animals (Norido, F. et al., Exp. Neurol. 83(2):221-232 (1984); Robertson et al., Diabetes 29(1):60-67 (1980); Giacomelli et al., Lab Invest. 40(4):460-473 (1979); Coleman, D. L., Diabetes 31 (Suppl):1-6 (1982)). These homozygous diabetic mice develop hyperglycemia that is resistant to insulin analogous to human type II diabetes (Mandel et al., J. Immunol. 120:1375-1377 (1978)).

[1046] The characteristics observed in these animals suggests that healing in this model may be similar to the healing observed in human diabetes (Greenhalgh, et al., Am. J. of Pathol. 136:1235-1246 (1990)).

[1047] Genetically diabetic female C57BL/KsJ (db+/db+) mice and their non-diabetic (db+/+m) heterozygous littermates are used in this study (Jackson Laboratories). The animals are purchased at 6 weeks of age and are 8 weeks old at the beginning of the study. Animals are individually housed and received food and water ad libitum. All manipulations are performed using aseptic techniques. The experiments are conducted according to the rules and guidelines of Human Genome Sciences, Inc. Institutional Animal Care and Use Committee and the Guidelines for the Care and Use of Laboratory Animals.

[1048] Wounding protocol is performed according to previously reported methods (Tsuboi, R. and Rifkin, D. B., J. Exp. Med. 172:245-251 (1990)). Briefly, on the day of wounding, animals are anesthetized with an intraperitoneal injection of Avertin (0.01 mg/mL), 2,2,2-tribromoethanol and 2-methyl-2-butanol dissolved in deionized water. The dorsal region of the animal is shaved and the skin washed with 70% ethanol solution and iodine. The surgical area is dried with sterile gauze prior to wounding. An 8 mm full-thickness wound is then created using a Keyes tissue punch. Immediately following wounding, the surrounding skin is gently stretched to eliminate wound expansion. The wounds are left open for the duration of the experiment. Application of the treatment is given topically for 5 consecutive days commencing on the day of wounding. Prior to treatment, wounds are gently cleansed with sterile saline and gauze sponges.

[1049] Wounds are visually examined and photographed at a fixed distance at the day of surgery and at two day intervals thereafter. Wound closure is determined by daily measurement on days 1-5 and on day 8. Wounds are measured horizontally and vertically using a calibrated Jameson caliper. Wounds are considered healed if granulation tissue is no longer visible and the wound is covered by a continuous epithelium.

[1050] An agonist or antagonist of the invention is administered using at a range different doses, from 4 mg to 500 mg per wound per day for 8 days in vehicle. Vehicle control groups received 50 mL of vehicle solution.

[1051] Animals are euthanized on day 8 with an intraperitoneal injection of sodium pentobarbital (300 mg/kg). The wounds and surrounding skin are then harvested for histology and immunohistochemistry. Tissue specimens are placed in 10% neutral buffered formalin in tissue cassettes between biopsy sponges for further processing. Three groups of 10 animals each (5 diabetic and 5 non-diabetic controls) are evaluated: 1) Vehicle placebo control, 2) untreated group, and 3) treated group. Wound closure is analyzed by measuring the area in the vertical and horizontal axis and obtaining the total square area of the wound. Contraction is then estimated by establishing the differences between the initial wound area (day 0) and that of post treatment (day 8). The wound area on day 1 is 64 mm², the corresponding size of the dermal punch. Calculations are made using the following formula:

[Open area on day 8]−[Open area on day 1]/[Open area on day 1]

[1052] Specimens are fixed in 10% buffered formalin and paraffin embedded blocks are sectioned perpendicular to the wound surface (5 mm) and cut using a Reichert-Jung microtome. Routine hematoxylin-eosin (H&E) staining is performed on cross-sections of bisected wounds. Histologic examination of the wounds are used to assess whether the healing process and the morphologic appearance of the repaired skin is altered by treatment with an agonist or antagonist of the invention. This assessment included verification of the presence of cell accumulation, inflammatory cells, capillaries, fibroblasts, re-epithelialization and epidermal maturity (Greenhalgh, D. G. et al., Am. J. Pathol. 136:1235 (1990)). A calibrated lens micrometer is used by a blinded observer.

[1053] Tissue sections are also stained immunohistochemically with a polyclonal rabbit anti-human keratin antibody using ABC Elite detection system. Human skin is used as a positive tissue control while non-immune IgG is used as a negative control. Keratinocyte growth is determined by evaluating the extent of reepithelialization of the wound using a calibrated lens micrometer.

[1054] Proliferating cell nuclear antigen/cyclin (PCNA) in skin specimens is demonstrated by using anti-PCNA antibody (1:50) with an ABC Elite detection system. Human colon cancer served as a positive tissue control and human brain tissue is used as a negative tissue control. Each specimen included a section with omission of the primary antibody and substitution with non-immune mouse IgG. Ranking of these sections is based on the extent of proliferation on a scale of 0-8, the lower side of the scale reflecting slight proliferation to the higher side reflecting intense proliferation.

[1055] Experimental data are analyzed using an unpaired t test. A p value of <0.05 is considered significant.

[1056] B. Steroid Impaired Rat Model

[1057] The inhibition of wound healing by steroids has been well documented in various in vitro and in vivo systems (Wahl, Glucocorticoids and Wound healing. In: Anti-Inflammatory Steroid Action: Basic and Clinical Aspects. 280-302 (1989); Wahlet al., J. Immunol. 115: 476-481 (1975); Werb et al., J. Exp. Med. 147:1684-1694 (1978)). Glucocorticoids retard wound healing by inhibiting angiogenesis, decreasing vascular permeability (Ebert et al., An. Intern. Med. 37:701-705 (1952)), fibroblast proliferation, and collagen synthesis (Beck et al., Growth Factors. 5: 295-304 (1991); Haynes et al., J. Clin. Invest. 61: 703-797 (1978)) and producing a transient reduction of circulating monocytes (Haynes et al., J. Clin. Invest. 61: 703-797 (1978); Wahl, “Glucocorticoids and wound healing”, In: Antiinflammatory Steroid Action: Basic and Clinical Aspects, Academic Press, New York, pp. 280-302 (1989)). The systemic administration of steroids to impaired wound healing is a well establish phenomenon in rats (Beck et al., Growth Factors. 5: 295-304 (1991); Haynes et al., J. Clin. Invest. 61: 703-797 (1978); Wahl, “Glucocorticoids and wound healing”, In: Antiinflammatory Steroid Action: Basic and Clinical Aspects, Academic Press, New York, pp. 280-302 (1989); Pierce et al., Proc. Natl. Acad. Sci. USA 86: 2229-2233 (1989)).

[1058] To demonstrate that an agonist or antagonist of the invention can accelerate the healing process, the effects of multiple topical applications of the agonist or antagonist on full thickness excisional skin wounds in rats in which healing has been impaired by the systemic administration of methylprednisolone is assessed.

[1059] Young adult male Sprague Dawley rats weighing 250-300 g (Charles River Laboratories) are used in this example. The animals are purchased at 8 weeks of age and are 9 weeks old at the beginning of the study. The healing response of rats is impaired by the systemic administration of methylprednisolone (17 mg/kg/rat intramuscularly) at the time of wounding. Animals are individually housed and received food and water ad libitum. All manipulations are performed using aseptic techniques. This study is conducted according to the rules and guidelines of Human Genome Sciences, Inc. Institutional Animal Care and Use Committee and the Guidelines for the Care and Use of Laboratory Animals.

[1060] The wounding protocol is followed according to section A, above. On the day of wounding, animals are anesthetized with an intramuscular injection of ketamine (50 mg/kg) and xylazine (5 mg/kg). The dorsal region of the animal is shaved and the skin washed with 70% ethanol and iodine solutions. The surgical area is dried with sterile gauze prior to wounding. An 8 mm full-thickness wound is created using a Keyes tissue punch. The wounds are left open for the duration of the experiment. Applications of the testing materials are given topically once a day for 7 consecutive days commencing on the day of wounding and subsequent to methylprednisolone administration. Prior to treatment, wounds are gently cleansed with sterile saline and gauze sponges.

[1061] Wounds are visually examined and photographed at a fixed distance at the day of wounding and at the end of treatment. Wound closure is determined by daily measurement on days 1-5 and on day 8. Wounds are measured horizontally and vertically using a calibrated Jameson caliper. Wounds are considered healed if granulation tissue is no longer visible and the wound is covered by a continuous epithelium.

[1062] The agonist or antagonist of the invention is administered using at a range different doses, from 4 mg to 500 mg per wound per day for 8 days in vehicle. Vehicle control groups received 50 mL of vehicle solution.

[1063] Animals are euthanized on day 8 with an intraperitoneal injection of sodium pentobarbital (300 mg/kg). The wounds and surrounding skin are then harvested for histology. Tissue specimens are placed in 10% neutral buffered formalin in tissue cassettes between biopsy sponges for further processing.

[1064] Four groups of 10 animals each (5 with methylprednisolone and 5 without glucocorticoid) are evaluated: 1) Untreated group 2) Vehicle placebo control 3) treated groups.

[1065] Wound closure is analyzed by measuring the area in the vertical and horizontal axis and obtaining the total area of the wound. Closure is then estimated by establishing the differences between the initial wound area (day 0) and that of post treatment (day 8). The wound area on day 1 is 64 mm², the corresponding size of the dermal punch. Calculations are made using the following formula:

[Open area on day 8]−[Open area on day 1]/[Open area on day 1]

[1066] Specimens are fixed in 10% buffered formalin and paraffin embedded blocks are sectioned perpendicular to the wound surface (5 mm) and cut using an Olympus microtome. Routine hematoxylin-eosin (H&E) staining is performed on cross-sections of bisected wounds. Histologic examination of the wounds allows assessment of whether the healing process and the morphologic appearance of the repaired skin is improved by treatment with an agonist or antagonist of the invention. A calibrated lens micrometer is used by a blinded observer to determine the distance of the wound gap.

[1067] Experimental data are analyzed using an unpaired t test. A p value of <0.05 is considered significant.

[1068] The studies described in this example tested activity of agonists or antagonists of the invention. However, one skilled in the art could easily modify the exemplified studies to test the activity of polynucleotides or polypeptides of the invention (e.g., gene therapy).

### Example 28

### Lymphadema Animal Model

[1069] The purpose of this experimental approach is to create an appropriate and consistent lymphedema model for testing the therapeutic effects of an agonist or antagonist of the invention in lymphangiogenesis and re-establishment of the lymphatic circulatory system in the rat hind limb. Effectiveness is measured by swelling volume of the affected limb, quantification of the amount of lymphatic vasculature, total blood plasma protein, and histopathology. Acute lymphedema is observed for 7-10 days. Perhaps more importantly, the chronic progress of the edema is followed for up to 3-4 weeks.

[1070] Prior to beginning surgery, blood sample is drawn for protein concentration analysis. Male rats weighing approximately ˜350 g are dosed with Pentobarbital. Subsequently, the right legs are shaved from knee to hip. The shaved area is swabbed with gauze soaked in 70% EtOH. Blood is drawn for serum total protein testing. Circumference and volumetric measurements are made prior to injecting dye into paws after marking 2 measurement levels (0.5 cm above heel, at mid-pt of dorsal paw). The intradermal dorsum of both right and left paws are injected with 0.05 ml of 1% Evan's Blue. Circumference and volumetric measurements are then made following injection of dye into paws.

[1071] Using the knee joint as a landmark, a mid-leg inguinal incision is made circumferentially allowing the femoral vessels to be located. Forceps and hemostats are used to dissect and separate the skin flaps. After locating the femoral vessels, the lymphatic vessel that runs along side and underneath the vessel(s) is located. The main lymphatic vessels in this area are then electrically coagulated or suture ligated.

[1072] Using a microscope, muscles in back of the leg (near the semitendinosis and adductors) are bluntly dissected. The popliteal lymph node is then located. The 2 proximal and 2 distal lymphatic vessels and distal blood supply of the popliteal node are then and ligated by suturing. The popliteal lymph node, and any accompanying adipose tissue, is then removed by cutting connective tissues.

[1073] Care is taken to control any mild bleeding resulting from this procedure. After lymphatics are occluded, the skin flaps are sealed by using liquid skin (Vetbond) (AJ Buck). The separated skin edges are sealed to the underlying muscle tissue while leaving a gap of ˜0.5 cm around the leg. Skin also may be anchored by suturing to underlying muscle when necessary.

[1074] To avoid infection, animals are housed individually with mesh (no bedding). Recovering animals are checked daily through the optimal edematous peak, which typically occurred by day 5-7. The plateau edematous peak are then observed. To evaluate the intensity of the lymphedema, the circumference and volumes of 2 designated places on each paw before operation and daily for 7 days are measured. The effect plasma proteins on lymphedema is determined and whether protein analysis is a useful testing perimeter is also investigated. The weights of both control and edematous limbs are evaluated at 2 places. Analysis is performed in a blind manner.

[1075] Circumference Measurements: Under brief gas anesthetic to prevent limb movement, a cloth tape is used to measure limb circumference. Measurements are done at the ankle bone and dorsal paw by 2 different people then those 2 readings are averaged. Readings are taken from both control and edematous limbs.

[1076] Volumetric Measurements: On the day of surgery, animals are anesthetized with Pentobarbital and are tested prior to surgery. For daily volumetrics animals are under brief halothane anesthetic (rapid immobilization and quick recovery), both legs are shaved and equally marked using waterproof marker on legs. Legs are first dipped in water, then dipped into instrument to each marked level then measured by Buxco edema software (Chen/Victor). Data is recorded by one person, while the other is dipping the limb to marked area.

[1077] Blood-plasma protein measurements: Blood is drawn, spun, and serum separated prior to surgery and then at conclusion for total protein and Ca2+ comparison.

[1078] Limb Weight Comparison: After drawing blood, the animal is prepared for tissue collection. The limbs are amputated using a quillitine, then both experimental and control legs are cut at the ligature and weighed. A second weighing is done as the tibio-cacaneal joint is disarticulated and the foot is weighed.

[1079] Histological Preparations: The transverse muscle located behind the knee (popliteal) area is dissected and arranged in a metal mold, filled with freezeGel, dipped into cold methylbutane, placed into labeled sample bags at −80EC until sectioning. Upon sectioning, the muscle is observed under fluorescent microscopy for lymphatics.

[1080] The studies described in this example tested activity of agonists or antagonists of the invention. However, one skilled in the art could easily modify the exemplified studies to test the activity of polynucleotides or polypeptides of the invention (e.g., gene therapy).

### Example 29

### Suppression of TNF alpha-induced Adhesion Molecule Expression by a Agonist or Antagonist of the Invention

[1081] The recruitment of lymphocytes to areas of inflammation and angiogenesis involves specific receptor-ligand interactions between cell surface adhesion molecules (CAMs) on lymphocytes and the vascular endothelium. The adhesion process, in both normal and pathological settings, follows a multi-step cascade that involves intercellular adhesion molecule-1 (ICAM-1), vascular cell adhesion molecule-1 (VCAM-1), and endothelial leukocyte adhesion molecule-1 (E-selectin) expression on endothelial cells (EC). The expression of these molecules and others on the vascular endothelium determines the efficiency with which leukocytes may adhere to the local vasculature and extravasate into the local tissue during the development of an inflammatory response. The local concentration of cytokines and growth factor participate in the modulation of the expression of these CAMs.

[1082] Tumor necrosis factor alpha (TNF-a), a potent proinflammatory cytokine, is a stimulator of all three CAMs on endothelial cells and may be involved in a wide variety of inflammatory responses, often resulting in a pathological outcome. The potential of an agonist or antagonist of the invention to mediate a suppression of TNF-a induced CAM expression can be examined. A modified ELISA assay which uses ECs as a solid phase absorbent is employed to measure the amount of CAM expression on TNF-a treated ECs when co-stimulated with a member of the FGF family of proteins.

[1083] To perform the experiment, human umbilical vein endothelial cell (HUVEC) cultures are obtained from pooled cord harvests and maintained in growth medium (EGM-2; Clonetics, San Diego, Calif.) supplemented with 10% FCS and 1% penicillin/streptomycin in a 37 degree C. humidified incubator containing 5% CO₂. HUVECs are seeded in 96-well plates at concentrations of 1×10⁴ cells/well in EGM medium at 37 degree C. for 18-24 hrs or until confluent. The monolayers are subsequently washed 3 times with a serum-free solution of RPMI-1640 supplemented with 100 U/ml penicillin and 100 mg/ml streptomycin, and treated with a given cytokine and/or growth factor(s) for 24 h at 37 degree C. Following incubation, the cells are then evaluated for CAM expression.

[1084] Human Umbilical Vein Endothelial cells (HUVECs) are grown in a standard 96 well plate to confluence. Growth medium is removed from the cells and replaced with 90 ul of 199 Medium (10% FBS). Samples for testing and positive or negative controls are added to the plate in triplicate (in 10 ul volumes). Plates are incubated at 37 degree C. for either 5 h (selectin and integrin expression) or 24 h (integrin expression only). Plates are aspirated to remove medium and 100 μl of 0.1% paraformaldehyde-PBS(with Ca++ and Mg++) is added to each well. Plates are held at 4° C. for 30 min.

[1085] Fixative is then removed from the wells and wells are washed 1× with PBS(+Ca,Mg)+0.5% BSA and drained. Do not allow the wells to dry. Add 10 μl of diluted primary antibody to the test and control wells. Anti-ICAM-1-Biotin, Anti-VCAM-1-Biotin and Anti-E-selectin-Biotin are used at a concentration of 10 μg/ml (1:10 dilution of 0.1 mg/ml stock antibody). Cells are incubated at 37° C. for 30 min. in a humidified environment. Wells are washed ×3 with PBS(+Ca,Mg)+0.5% BSA.

[1086] Then add 20 μl of diluted ExtrAvidin-Alkaline Phosphotase (1:5,000 dilution) to each well and incubated at 37° C. for 30 min. Wells are washed ×3 with PBS(+Ca,Mg)+0.5% BSA. 1 tablet of p-Nitrophenol Phosphate pNPP is dissolved in 5 ml of glycine buffer (pH 10.4). 100 μl of pNPP substrate in glycine buffer is added to each test well. Standard wells in triplicate are prepared from the working dilution of the ExtrAvidin-Alkaline Phosphotase in glycine buffer: 1:5,000 (10⁰)>10^{-0.5}>10⁻¹>10^{-1.5}. 5 μl of each dilution is added to triplicate wells and the resulting AP content in each well is 5.50 ng, 1.74 ng, 0.55 ng, 0.18 ng. 100 μl of pNNP reagent must then be added to each of the standard wells. The plate must be incubated at 37° C. for 4h. A volume of 50 μl of 3M NaOH is added to all wells. The results are quantified on a plate reader at 405 nm. The background subtraction option is used on blank wells filled with glycine buffer only. The template is set up to indicate the concentration of AP-conjugate in each standard well [5.50 ng; 1.74 ng; 0.55 ng; 0.18 ng]. Results are indicated as amount of bound AP-conjugate in each sample.

[1087] The studies described in this example tested activity of agonists or antagonists of the invention. However, one skilled in the art could easily modify the exemplified studies to test the activity of polynucleotides or polypeptides of the invention (e.g., gene therapy).

### Example 30

### Production of Polypeptide of the Invention for High-Throughput Screening Assays

[1088] The following protocol produces a supernatant containing polypeptide of the present invention to be tested. This supernatant can then be used in the Screening Assays described in Examples 32-41.

[1089] First, dilute Poly-D-Lysine (644 587 Boehringer-Mannheim) stock solution (1 mg/ml in PBS) 1:20 in PBS (w/o calcium or magnesium 17-516F Biowhittaker) for a working solution of 50 ug/ml. Add 200 ul of this solution to each well (24 well plates) and incubate at RT for 20 minutes. Be sure to distribute the solution over each well (note: a 12-channel pipetter may be used with tips on every other channel). Aspirate off the Poly-D-Lysine solution and rinse with 1 ml PBS (Phosphate Buffered Saline). The PBS should remain in the well until just prior to plating the cells and plates may be poly-lysine coated in advance for up to two weeks.

[1090] Plate 293T cells (do not carry cells past P+20) at 2×10⁵ cells/well in 0.5 ml DMEM (Dulbecco's Modified Eagle Medium) (with 4.5 G/L glucose and L-glutamine (12-604F Biowhittaker))/10% heat inactivated FBS (14-503F Biowhittaker)/1×Penstrep (17-602E Biowhittaker). Let the cells grow overnight.

[1091] The next day, mix together in a sterile solution basin: 300 ul Lipofectamine (18324-012 Gibco/BRL) and 5 ml Optimem I (31985070 Gibco/BRL)/96-well plate. With a small volume multi-channel pipetter, aliquot approximately 2 ug of an expression vector containing a polynucleotide insert, produced by the methods described in Examples 8-10, into an appropriately labeled 96-well round bottom plate. With a multi-channel pipetter, add 50 ul of the Lipofectamine/Optimem I mixture to each well. Pipette up and down gently to mix. Incubate at RT 15-45 minutes. After about 20 minutes, use a multi-channel pipetter to add 150 ul Optimem I to each well. As a control, one plate of vector DNA lacking an insert should be transfected with each set of transfections.

[1092] Preferably, the transfection should be performed by tag-teaming the following tasks. By tag-teaming, hands on time is cut in half, and the cells do not spend too much time on PBS. First, person A aspirates off the media from four 24-well plates of cells, and then person B rinses each well with 0.5-1 ml PBS. Person A then aspirates off PBS rinse, and person B, using a 12-channel pipetter with tips on every other channel, adds the 200 ul of DNA/Lipofectamine/Optimem I complex to the odd wells first, then to the even wells, to each row on the 24-well plates. Incubate at 37 degree C. for 6 hours.

[1093] While cells are incubating, prepare appropriate media, either 1% BSA in DMEM with 1×penstrep, or HGS CHO-5 media (116.6 mg/L of CaCl2 (anhyd); 0.00130 mg/L CuSO₄-5H₂O; 0.050 mg/L of Fe(NO₃)₃-9H₂O; 0.417 mg/L of FeSO₄-7H₂O; 311.80 mg/L of Kcl; 28.64 mg/L of MgCl₂; 48.84 mg/L of MgSO₄; 6995.50 mg/L of NaCl; 2400.0 mg/L of NaHCO₃; 62.50 mg/L of NaH₂PO₄-H₂O; 71.02 mg/L of Na₂HPO4; 0.4320 mg/L of ZnSO₄-7H₂O; 0.002 mg/L of Arachidonic Acid; 1.022 mg/L of Cholesterol; 0.070 mg/L of DL-alpha-Tocopherol-Acetate; 0.0520 mg/L of Linoleic Acid; 0.010 mg/L of Linolenic Acid; 0.010 mg/L of Myristic Acid; 0.010 mg/L of Oleic Acid; 0.010 mg/L of Palmitric Acid; 0.010 mg/L of Palmitic Acid; 100 mg/L of Pluronic F-68; 0.010 mg/L of Stearic Acid; 2.20 mg/L of Tween 80; 4551 mg/L of D-Glucose; 130.85 mg/ml of L-Alanine; 147.50 mg/ml of L-Arginine-HCL; 7.50 mg/ml of L-Asparagine-H₂O; 6.65 mg/ml of L-Aspartic Acid; 29.56 mg/ml of L-Cystine-2HCL-H₂O; 31.29 mg/ml of L-Cystine-2HCL; 7.35 mg/ml of L-Glutamic Acid; 365.0 mg/ml of L-Glutamine; 18.75 mg/ml of Glycine; 52.48 mg/ml of L-Histidine-HCL-H₂O; 106.97 mg/ml of L-Isoleucine; 111.45 mg/ml of L-Leucine; 163.75 mg/ml of L-Lysine HCL; 32.34 mg/ml of L-Methionine; 68.48 mg/ml of L-Phenylalainine; 40.0 mg/ml of L-Proline; 26.25 mg/ml of L-Serine; 101.05 mg/ml of L-Threonine; 19.22 mg/ml of L-Tryptophan; 91.79 mg/ml of L-Tryrosine-2Na-2H₂O; and 99.65 mg/ml of L-Valine; 0.0035 mg/L of Biotin; 3.24 mg/L of D-Ca Pantothenate; 11.78 mg/L of Choline Chloride; 4.65 mg/L of Folic Acid; 15.60 mg/L of i-Inositol; 3.02 mg/L of Niacinamide; 3.00 mg/L of Pyridoxal HCL; 0.031 mg/L of Pyridoxine HCL; 0.319 mg/L of Riboflavin; 3.17 mg/L of Thiamine HCL; 0.365 mg/L of Thymidine; 0.680 mg/L of Vitamin B₁₂; 25 mM of HEPES Buffer; 2.39 mg/L of Na Hypoxanthine; 0.105 mg/L of Lipoic Acid; 0.081 mg/L of Sodium Putrescine-2HCL; 55.0 mg/L of Sodium Pyruvate; 0.0067 mg/L of Sodium Selenite; 20 uM of Ethanolamine; 0.122 mg/L of Ferric Citrate; 41.70 mg/L of Methyl-B-Cyclodextrin complexed with Linoleic Acid; 33.33 mg/L of Methyl-B-Cyclodextrin complexed with Oleic Acid; 10 mg/L of Methyl-B-Cyclodextrin complexed with Retinal Acetate. Adjust osmolarity to 327 mOsm) with 2 mm glutamine and 1×penstrep. (BSA (81-068-3 Bayer) 100 gm dissolved in 1 L DMEM for a 10% BSA stock solution). Filter the media and collect 50 ul for endotoxin assay in 15 ml polystyrene conical.

[1094] The transfection reaction is terminated, preferably by tag-teaming, at the end of the incubation period. Person A aspirates off the transfection media, while person B adds 1.5 ml appropriate media to each well. Incubate at 37 degree C. for 45 or 72 hours depending on the media used: 1% BSA for 45 hours or CHO-5 for 72 hours.

[1095] On day four, using a 300 ul multichannel pipetter, aliquot 600 ul in one 1 ml deep well plate and the remaining supernatant into a 2 ml deep well. The supernatants from each well can then be used in the assays described in Examples 32-39.

[1096] It is specifically understood that when activity is obtained in any of the assays described below using a supernatant, the activity originates from either the polypeptide of the present invention directly (e.g., as a secreted protein) or by polypeptide of the present invention inducing expression of other proteins, which are then secreted into the supernatant. Thus, the invention further provides a method of identifying the protein in the supernatant characterized by an activity in a particular assay.

### Example 31

### Construction of GAS Reporter Construct

[1097] One signal transduction pathway involved in the differentiation and proliferation of cells is called the Jaks-STATs pathway. Activated proteins in the Jaks-STATs pathway bind to gamma activation site “GAS” elements or interferon-sensitive responsive element (“ISRE”), located in the promoter of many genes. The binding of a protein to these elements alter the expression of the associated gene.

[1098] GAS and ISRE elements are recognized by a class of transcription factors called Signal Transducers and Activators of Transcription, or “STATs.” There are six members of the STATs family. Stat1 and Stat3 are present in many cell types, as is Stat2 (as response to IFN-alpha is widespread). Stat4 is more restricted and is not in many cell types though it has been found in T helper class I, cells after treatment with IL-12. Stat5 was originally called mammary growth factor, but has been found at higher concentrations in other cells including myeloid cells. It can be activated in tissue culture cells by many cytokines.

[1099] The STATs are activated to translocate from the cytoplasm to the nucleus upon tyrosine phosphorylation by a set of kinases known as the Janus Kinase (“Jaks”) family. Jaks represent a distinct family of soluble tyrosine kinases and include Tyk2, Jak1, Jak2, and Jak3. These kinases display significant sequence similarity and are generally catalytically inactive in resting cells.

[1100] The Jaks are activated by a wide range of receptors summarized in the Table below. (Adapted from review by Schidler and Darnell, Ann. Rev. Biochem. 64:621-51 (1995).) A cytokine receptor family, capable of activating Jaks, is divided into two groups: (a) Class 1 includes receptors for IL-2, IL-3, IL-4, IL-6, IL-7, IL-9, IL-11, IL-12, IL-15, Epo, PRL, GH, G-CSF, GM-CSF, LIF, CNTF, and thrombopoietin; and (b) Class 2 includes IFN-a, IFN-g, and IL-10. The Class 1 receptors share a conserved cysteine motif (a set of four conserved cysteines and one tryptophan) and a WSXWS motif (a membrane proximal region encoding Trp-Ser-Xxx-Trp-Ser (SEQ ID NO:1548)).

[1101] Thus, on binding of a ligand to a receptor, Jaks are activated, which in turn activate STATs, which then translocate and bind to GAS elements. This entire process is encompassed in the Jaks-STATs signal transduction pathway.

[1102] Therefore, activation of the Jaks-STATs pathway, reflected by the binding of the GAS or the ISRE element, can be used to indicate proteins involved in the proliferation and differentiation of cells. For example, growth factors and cytokines are known to activate the Jaks-STATs pathway. (See Table below.) Thus, by using GAS elements linked to reporter molecules, activators of the Jaks-STATs pathway can be identified.

| | | | | | | GAS |
|---|---|---|---|---|---|---|
| | JAKs | | | | | (elements) |
| Ligand | tyk2 | Jak1 | Jak2 | Jak3 | STATS | or ISRE |
| IFN family | | | | | | |
| IFN-a/B | + | + | − | − | 1,2,3 | ISRE |
| IFN-g | | + | + | − | 1 | GAS |
| | | | | | | (IRF1> |
| | | | | | | Lys6> |
| | | | | | | IFP) |
| I1-10 | + | ? | ? | − | 1,3 | |
| gp130 family | | | | | | |
| IL-6 (Pleiotrohic) | + | + | + | ? | 1,3 | GAS |
| | | | | | | (IRF1> |
| | | | | | | Lys6> |
| | | | | | | IFP) |
| I1-11(Pleiotrohic) | ? | + | ? | ? | 1,3 | |
| OnM(Pleiotrohic) | ? | + | + | ? | 1,3 | |
| LIF(Pleiotrohic) | ? | + | + | ? | 1,3 | |
| CNTF(Pleiotrohic) | −/+ | + | + | ? | 1,3 | |
| G-CSF(Pleiotrohic) | ? | + | ? | ? | 1,3 | |
| IL-12(Pleiotrohic) | + | − | + | + | 1,3 | |
| g-C family | | | | | | |
| IL-2 (lymphocytes) | − | + | − | + | 1,3,5 | GAS |
| IL-4 (lymph/myeloid) | − | + | − | + | 6 | GAS |
| | | | | | | (IRF1 = |
| | | | | | | IFP >> |
| | | | | | | Ly6)(IgH) |
| IL-7 (lymphocytes) | − | + | − | + | 5 | GAS |
| IL-9 (lymphocytes) | − | + | − | + | 5 | GAS |
| IL-13 (lymphocyte) | − | + | ? | ? | 6 | GAS |
| IL-15 | ? | + | ? | + | 5 | GAS |
| gp140 family | | | | | | |
| IL-3 (myeloid) | − | − | + | − | 5 | GAS |
| | | | | | | (IRF1> |
| | | | | | | IFP>> |
| | | | | | | Ly6) |
| IL-5 (myeloid) | − | − | + | − | 5 | GAS |
| GM-CSF (myeloid) | − | − | + | − | 5 | GAS |
| Growth | | | | | | |
| hormone family | | | | | | |
| GH | ? | − | + | − | 5 | |
| PRL | ? | +/− | + | − | 1,3,5 | |
| EPO | ? | − | + | − | 5 | GAS(B- |
| | | | | | | CAS> |
| | | | | | | IRF1> |
| | | | | | | IFP>> |
| | | | | | | Ly6) |
| Receptor | | | | | | |
| Tyrosine Kinases | | | | | | |
| EGF | ? | + | + | − | 1,3 | GAS |
| | | | | | | (IRF1) |
| PDGF | ? | + | + | − | 1,3 | |
| CSF-1 | ? | + | + | − | 1,3 | GAS |
| | | | | | | (not IRF1) |

[1103] To construct a synthetic GAS containing promoter element, which is used in the Biological Assays described in Examples 32-33, a PCR based strategy is employed to generate a GAS-SV40 promoter sequence. The 5′ primer contains four tandem copies of the GAS binding site found in the IRF1 promoter and previously demonstrated to bind STATs upon induction with a range of cytokines (Rothman et al., Immunity 1:457-468 (1994).), although other GAS or ISRE elements can be used instead. The 5′ primer also contains 18 bp of sequence complementary to the SV40 early promoter sequence and is flanked with an XhoI site. The sequence of the 5′ primer is:

| | |
|---|---|
| 5′:GCGCCTCGAGATTTCCCCGAAATCTAGAT | (SEQ ID NO:1549). |
| TTCCCCGAAATGATTTCCCCGAAATGATTTCC | |
| CCGAAATATCTGCCATCTCAATTAG:3′ | |

[1104] The downstream primer is complementary to the SV40 promoter and is flanked with a HindIII site:

| 5′:GCGGCAAGCTTTTTGCAAAGCCTAGGC:3′ | (SEQ ID NO: |
|---|---|
| | 1550). |

[1105] (SEQ ID NO:1550).

[1106] PCR amplification is performed using the SV40 promoter template present in the B-gal:promoter plasmid obtained from Clontech. The resulting PCR fragment is digested with XhoI/HindIII and subcloned into BLSK2-. (Stratagene.) Sequencing with forward and reverse primers confirms that the insert contains the following sequence:

| | |
|---|---|
| 5′:CTCGAGATTTCCCCGAAATCTAGATTTCC | (SEQ ID NO:1551). |
| CCGAAATGATTTCCCCGAAATGATTTCCCCGA | |
| AATATCTGCCATCTCAATTAGTCAGCAACCAT | |
| AGTCCCGCCCCTAACTCCGCCCATCCCGCCCC | |
| TAACTCCGCCCAGTTCCGCCCATTCTCCGCCC | |
| CATGGCTGACTAATTTTTTTTATTTATGCAGA | |
| GGCCGAGGCCGCCTCGGCCTCTGAGCTATTCC | |
| AGAAGTAGTGAGGAGGCTTTTTTGGAGGCCTA | |
| GGCTTTTGCAAAAAGCTT:3′ | |

[1107] (SEQ ID NO:1551).

[1108] With this GAS promoter element linked to the SV40 promoter, a GAS:SEAP2 reporter construct is next engineered. Here, the reporter molecule is a secreted alkaline phosphatase, or “SEAP.” Clearly, however, any reporter molecule can be instead of SEAP, in this or in any of the other Examples. Well known reporter molecules that can be used instead of SEAP include chloramphenicol acetyltransferase (CAT), luciferase, alkaline phosphatase, B-galactosidase, green fluorescent protein (GFP), or any protein detectable by an antibody.

[1109] The above sequence confirmed synthetic GAS-SV40 promoter element is subcloned into the pSEAP-Promoter vector obtained from Clontech using HindIII and XhoI, effectively replacing the SV40 promoter with the amplified GAS:SV40 promoter element, to create the GAS-SEAP vector. However, this vector does not contain a neomycin resistance gene, and therefore, is not preferred for mammalian expression systems.

[1110] Thus, in order to generate mammalian stable cell lines expressing the GAS-SEAP reporter, the GAS-SEAP cassette is removed from the GAS-SEAP vector using SalI and NotI, and inserted into a backbone vector containing the neomycin resistance gene, such as pGFP-1 (Clontech), using these restriction sites in the multiple cloning site, to create the GAS-SEAP/Neo vector. Once this vector is transfected into mammalian cells, this vector can then be used as a reporter molecule for GAS binding as described in Examples 32-33.

[1111] Other constructs can be made using the above description and replacing GAS with a different promoter sequence. For example, construction of reporter molecules containing NFK-B and EGR promoter sequences are described in Examples 35 and 36. However, many other promoters can be substituted using the protocols described in these Examples. For instance, SRE, IL-2, NFAT, or Osteocalcin promoters can be substituted, alone or in combination (e.g., GAS/NF-KB/EGR, GAS/NF-KB, I1-2/NFAT, or NF-KB/GAS). Similarly, other cell lines can be used to test reporter construct activity, such as HELA (epithelial), HUVEC (endothelial), Reh (B-cell), Saos-2 (osteoblast), HUVAC (aortic), or Cardiomyocyte.

### Example 32

### High-Throughput Screening Assay for T-cell Activity

[1112] The following protocol is used to assess T-cell activity by identifying factors, and determining whether supernate containing a polypeptide of the invention proliferates and/or differentiates T-cells. T-cell activity is assessed using the GAS/SEAP/Neo construct produced in Example 31. Thus, factors that increase SEAP activity indicate the ability to activate the Jaks-STATS signal transduction pathway. The T-cell used in this assay is Jurkat T-cells (ATCC Accession No. TIB-152), although Molt-3 cells (ATCC Accession No. CRL-1552) and Molt-4 cells (ATCC Accession No. CRL-1582) cells can also be used.

[1113] Jurkat T-cells are lymphoblastic CD4+ Th1 helper cells. In order to generate stable cell lines, approximately 2 million Jurkat cells are transfected with the GAS-SEAP/neo vector using DMRIE-C (Life Technologies)(transfection procedure described below). The transfected cells are seeded to a density of approximately 20,000 cells per well and transfectants resistant to 1 mg/ml genticin selected. Resistant colonies are expanded and then tested for their response to increasing concentrations of interferon gamma. The dose response of a selected clone is demonstrated.

[1114] Specifically, the following protocol will yield sufficient cells for 75 wells containing 200 ul of cells. Thus, it is either scaled up, or performed in multiple to generate sufficient cells for multiple 96 well plates. Jurkat cells are maintained in RPMI +10% serum with 1% Pen-Strep. Combine 2.5 mls of OPTI-MEM (Life Technologies) with 10 ug of plasmid DNA in a T25 flask. Add 2.5 ml OPTI-MEM containing 50 ul of DMRIE-C and incubate at room temperature for 15-45 mins.

[1115] During the incubation period, count cell concentration, spin down the required number of cells (10⁷ per transfection), and resuspend in OPTI-MEM to a final concentration of 10⁷ cells/ml. Then add 1 ml of 1×10⁷ cells in OPTI-MEM to T25 flask and incubate at 37 degree C. for 6 hrs. After the incubation, add 10 ml of RPMI+15% serum.

[1116] The Jurkat:GAS-SEAP stable reporter lines are maintained in RPMI+10% serum, 1 mg/ml Genticin, and 1% Pen-Strep. These cells are treated with supernatants containing polypeptide of the present invention or polypeptide of the present invention induced polypeptides as produced by the protocol described in Example 30.

[1117] On the day of treatment with the supernatant, the cells should be washed and resuspended in fresh RPMI+10% serum to a density of 500,000 cells per ml. The exact number of cells required will depend on the number of supernatants being screened. For one 96 well plate, approximately 10 million cells (for 10 plates, 100 million cells) are required.

[1118] Transfer the cells to a triangular reservoir boat, in order to dispense the cells into a 96 well dish, using a 12 channel pipette. Using a 12 channel pipette, transfer 200 ul of cells into each well (therefore adding 100, 000 cells per well).

[1119] After all the plates have been seeded, 50 ul of the supernatants are transferred directly from the 96 well plate containing the supernatants into each well using a 12 channel pipette. In addition, a dose of exogenous interferon gamma (0.1, 1.0, 10 ng) is added to wells H9, H10, and H11 to serve as additional positive controls for the assay.

[1120] The 96 well dishes containing Jurkat cells treated with supernatants are placed in an incubator for 48 hrs (note: this time is variable between 48-72 hrs). 35 ul samples from each well are then transferred to an opaque 96 well plate using a 12 channel pipette. The opaque plates should be covered (using sellophene covers) and stored at −20 degree C. until SEAP assays are performed according to Example 36. The plates containing the remaining treated cells are placed at 4 degree C. and serve as a source of material for repeating the assay on a specific well if desired.

[1121] As a positive control, 100 Unit/ml interferon gamma can be used which is known to activate Jurkat T cells. Over 30 fold induction is typically observed in the positive control wells.

[1122] The above protocol may be used in the generation of both transient, as well as, stable transfected cells, which would be apparent to those of skill in the art.

### Example 34

### High-Throughput Screening Assay Identifying Myeloid Activity

[1123] The following protocol is used to assess myeloid activity of polypeptide of the present invention by determining whether polypeptide of the present invention proliferates and/or differentiates myeloid cells. Myeloid cell activity is assessed using the GAS/SEAP/Neo construct produced in Example 32. Thus, factors that increase SEAP activity indicate the ability to activate the Jaks-STATS signal transduction pathway. The myeloid cell used in this assay is U937, a pre-monocyte cell line, although TF-1, HL60, or KG1 can be used.

[1124] To transiently transfect U937 cells with the GAS/SEAP/Neo construct produced in Example 32, a DEAE-Dextran method (Kharbanda et. al., 1994, Cell Growth & Differentiation, 5:259-265) is used. First, harvest 2×10e⁷ U937 cells and wash with PBS. The U937 cells are usually grown in RPMI 1640 medium containing 10% heat-inactivated fetal bovine serum (FBS) supplemented with 100 units/ml penicillin and 100 mg/ml streptomycin.

[1125] Next, suspend the cells in 1 ml of 20 mM Tris-HCl (pH 7.4) buffer containing 0.5 mg/ml DEAE-Dextran, 8 ug GAS-SEAP2 plasmid DNA, 140 mM NaCl, 5 mM KCl, 375 uM Na₂HPO₄.7H₂O,1 mM MgCl₂, and 675 uM CaCl₂. Incubate at 37 degrees C. for 45 min.

[1126] Wash the cells with RPMI 1640 medium containing 10% FBS and then resuspend in 10 ml complete medium and incubate at 37 degree C. for 36 hr.

[1127] The GAS-SEAP/U937 stable cells are obtained by growing the cells in 400 ug/ml G418. The G418-free medium is used for routine growth but every one to two months, the cells should be re-grown in 400 ug/ml G418 for couple of passages.

[1128] These cells are tested by harvesting 1×10 cells (this is enough for ten 96-well plates assay) and wash with PBS. Suspend the cells in 200 ml above described growth medium, with a final density of 5×10⁵ cells/ml. Plate 200 ul cells per well in the 96-well plate (or 1×10⁵ cells/well).

[1129] Add 50 ul of the supernatant prepared by the protocol described in Example 30. Incubate at 37 degree C. for 48 to 72 hr. As a positive control, 100 Unit/ml interferon gamma can be used which is known to activate U937 cells. Over 30 fold induction is typically observed in the positive control wells. SEAP assay the supernatant according to the protocol described in Example 36.

### Example 34

### High-Throughput Screening Assay Identifying Neuronal Activity

[1130] When cells undergo differentiation and proliferation, a group of genes are activated through many different signal transduction pathways. One of these genes, EGR1 (early growth response gene 1), is induced in various tissues and cell types upon activation. The promoter of EGR1 is responsible for such induction. Using the EGR1 promoter linked to reporter molecules, activation of cells can be assessed by polypeptide of the present invention.

[1131] Particularly, the following protocol is used to assess neuronal activity in PC12 cell lines. PC12 cells (rat phenochromocytoma cells) are known to proliferate and/or differentiate by activation with a number of mitogens, such as TPA (tetradecanoyl phorbol acetate), NGF (nerve growth factor), and EGF (epidermal growth factor). The EGR1 gene expression is activated during this treatment. Thus, by stably transfecting PC12 cells with a construct containing an EGR promoter linked to SEAP reporter, activation of PC12 cells by polypeptide of the present invention can be assessed.

[1132] The EGR/SEAP reporter construct can be assembled by the following protocol. The EGR-1 promoter sequence (−633 to +1) (Sakamoto K et al., Oncogene 6:867-871 (1991)) can be PCR amplified from human genomic DNA using the following primers:

| 5′ GCGCTCGAGGGATGACAGCGATAGAACCCCGG-3′ | (SEQ ID NO: |
|---|---|
| | 1552) |

[1133] (SEQ ID NO:1552) and

| 5′ GCGAAGCTTCGCGACTCCCCGGATCCGCCTC-3′ | (SEQ ID NO: |
|---|---|
| | 1553) |

[1134] (SEQ ID NO:1553).

[1135] Using the GAS:SEAP/Neo vector produced in Example 31, EGR1 amplified product can then be inserted into this vector. Linearize the GAS:SEAP/Neo vector using restriction enzymes XhoI/HindIII, removing the GAS/SV40 stuffer. Restrict the EGR1 amplified product with these same enzymes. Ligate the vector and the EGR1 promoter.

[1136] To prepare 96 well-plates for cell culture, two mls of a coating solution (1:30 dilution of collagen type I (Upstate Biotech Inc. Cat#08-115) in 30% ethanol (filter sterilized)) is added per one 10 cm plate or 50 ml per well of the 96-well plate, and allowed to air dry for 2 hr.

[1137] PC12 cells are routinely grown in RPMI-1640 medium (Bio Whittaker) containing 10% horse serum (JRH BIOSCIENCES, Cat. # 12449-78P), 5% heat-inactivated fetal bovine serum (FBS) supplemented with 100 units/ml penicillin and 100 ug/ml streptomycin on a precoated 10 cm tissue culture dish. One to four split is done every three to four days. Cells are removed from the plates by scraping and resuspended with pipetting up and down for more than 15 times.

[1138] Transfect the EGR/SEAP/Neo construct into PC12 using the Lipofectamine protocol described in Example 31. EGR-SEAP/PC12 stable cells are obtained by growing the cells in 300 ug/ml G418. The G418-free medium is used for routine growth but every one to two months, the cells should be re-grown in 300 ug/ml G418 for couple of passages.

[1139] To assay for neuronal activity, a 10 cm plate with cells around 70 to 80% confluent is screened by removing the old medium. Wash the cells once with PBS (Phosphate buffered saline). Then starve the cells in low serum medium (RPMI-1640 containing 1% horse serum and 0.5% FBS with antibiotics) overnight.

[1140] The next morning, remove the medium and wash the cells with PBS. Scrape off the cells from the plate, suspend the cells well in 2 ml low serum medium. Count the cell number and add more low serum medium to reach final cell density as 5×10⁵ cells/ml.

[1141] Add 200 ul of the cell suspension to each well of 96-well plate (equivalent to 1×10⁵ cells/well). Add 50 ul supernatant produced by Example 31, 37 degree C. for 48 to 72 hr. As a positive control, a growth factor known to activate PC12 cells through EGR can be used, such as 50 ng/ul of Neuronal Growth Factor (NGF). Over fifty-fold induction of SEAP is typically seen in the positive control wells. SEAP assay the supernatant according to Example 37.

### Example 36

### High-Throughput Screening Assay for T-cell Activity

[1142] NF-KB (Nuclear Factor KB) is a transcription factor activated by a wide variety of agents including the inflammatory cytokines IL-1 and TNF, CD30 and CD40, lymphotoxin-alpha and lymphotoxin-beta, by exposure to LPS or thrombin, and by expression of certain viral gene products. As a transcription factor, NF-KB regulates the expression of genes involved in immune cell activation, control of apoptosis (NF-KB appears to shield cells from apoptosis), B and T-cell development, anti-viral and antimicrobial responses, and multiple stress responses.

[1143] In non-stimulated conditions, NF-KB is retained in the cytoplasm with I-KB (Inhibitor KB). However, upon stimulation, I-KB is phosphorylated and degraded, causing NF-KB to shuttle to the nucleus, thereby activating transcription of target genes. Target genes activated by NF-KB include IL-2, IL-6, GM-CSF, ICAM-1 and class 1 MHC.

[1144] Due to its central role and ability to respond to a range of stimuli, reporter constructs utilizing the NF-KB promoter element are used to screen the supernatants produced in Example 30. Activators or inhibitors of NF-KB would be useful in treating, preventing, and/or diagnosing diseases. For example, inhibitors of NF-KB could be used to treat those diseases related to the acute or chronic activation of NF-KB, such as rheumatoid arthritis.

[1145] To construct a vector containing the NF-KB promoter element, a PCR based strategy is employed. The upstream primer contains four tandem copies of the NF-KB binding site

| | |
|---|---|
| (GGGGACTTTTCCC) | (SEQ ID NO:1554), |

[1146] (SEQ ID NO:1554), 18 bp of sequence complementary to the 5′ end of the SV40 early promoter sequence, and is flanked with an XhoI site:

| | |
|---|---|
| 5′:GCGGCCTCGAGGGGACTTTCCCGGGGACT | (SEQ ID NO:1555). |
| TTCCGGGGACTTTCCGGGACTTTCCATCCTGC | |
| CATCTCAATTAG:3′ | |

[1147] (SEQ ID NO:1555).

[1148] The downstream primer is complementary to the 3′ end of the SV40 promoter and is flanked with a Hind III site:

| 5′:GCGGCAAGCTTTTTGCAAAGCCTAGGC:3′ | (SEQ ID NO: |
|---|---|
| | 1550. |

[1149] (SEQ ID NO:1550).

[1150] PCR amplification is performed using the SV40 promoter template present in the pB-gal:promoter plasmid obtained from Clontech. The resulting PCR fragment is digested with XhoI and Hind III and subcloned into BLSK2-. (Stratagene) Sequencing with the T7 and T3 primers confirms the insert contains the following sequence:

| | |
|---|---|
| 5′:CTCGAGGGGACTTTCCCGGGGACTTTCCG | (SEQ ID NO:1556). |
| GGGACTTTCCGGGACTTTCCATCTGCCATCTC | |
| AATTAGTCAGCAACCATAGTCCCGCCCCTAAC | |
| TCCGCCCATCCCGCCCCTAACTCCGCCCAGTT | |
| CCGCCCATTCTCCGCCCCATGGCTGACTAATT | |
| TTTTTTATTTATGCAGAGGCCGAGGCCGCCTC | |
| GGCCTCTGAGCTATTCCAGAAGTAGTGAGGAG | |
| GCTTTTTTGGAGGCCTAGGCTTTTGCAAAAAG | |
| CTT:3′ | |

[1151] (SEQ ID NO:1556).

[1152] Next, replace the SV40 minimal promoter element present in the pSEAP2-promoter plasmid (Clontech) with this NF-KB/SV40 fragment using XhoI and HindIII. However, this vector does not contain a neomycin resistance gene, and therefore, is not preferred for mammalian expression systems.

[1153] In order to generate stable mammalian cell lines, the NF-KB/SV40/SEAP cassette is removed from the above NF-KB/SEAP vector using restriction enzymes SalI and NotI, and inserted into a vector containing neomycin resistance. Particularly, the NF-KB/SV40/SEAP cassette was inserted into pGFP-1 (Clontech), replacing the GFP gene, after restricting pGFP-1 with SalI and NotI.

[1154] Once NF-KB/SV40/SEAP/Neo vector is created, stable Jurkat T-cells are created and maintained according to the protocol described in Example 32. Similarly, the method for assaying supernatants with these stable Jurkat T-cells is also described in Example 32. As a positive control, exogenous TNF alpha (0.1, 1, 10 ng) is added to wells H9, H10, and H11, with a 5-10 fold activation typically observed.

### Example36

### Assay for SEAP Activity

[1155] As a reporter molecule for the assays described in Examples 32-35, SEAP activity is assayed using the Tropix Phospho-light Kit (Cat. BP-400) according to the following general procedure. The Tropix Phospho-light Kit supplies the Dilution, Assay, and Reaction Buffers used below.

[1156] Prime a dispenser with the 2.5x Dilution Buffer and dispense 15 ul of 2.5×dilution buffer into Optiplates containing 35 ul of a supernatant. Seal the plates with a plastic sealer and incubate at 65 degree C. for 30 min. Separate the Optiplates to avoid uneven heating.

[1157] Cool the samples to room temperature for 15 minutes. Empty the dispenser and prime with the Assay Buffer. Add 50 ml Assay Buffer and incubate at room temperature 5 min. Empty the dispenser and prime with the Reaction Buffer (see the table below). Add 50 ul Reaction Buffer and incubate at room temperature for 20 minutes. Since the intensity of the chemiluminescent signal is time dependent, and it takes about 10 minutes to read 5 plates on luminometer, one should treat 5 plates at each time and start the second set 10 minutes later.

[1158] Read the relative light unit in the luminometer. Set H12 as blank, and print the results. An increase in chemiluminescence indicates reporter activity.

[1159] Reaction Buffer Formulation

| # of plates | Rxn buffer diluent (ml) | CSPD (ml) |
|---|---|---|
| 10 | 60 | 3 |
| 11 | 65 | 3.25 |
| 12 | 70 | 3.5 |
| 13 | 75 | 3.75 |
| 14 | 80 | 4 |
| 15 | 85 | 4.25 |
| 16 | 90 | 4.5 |
| 17 | 95 | 4.75 |
| 18 | 100 | 5 |
| 19 | 105 | 5.25 |
| 20 | 110 | 5.5 |
| 21 | 115 | 5.75 |
| 22 | 120 | 6 |
| 23 | 125 | 6.25 |
| 24 | 130 | 6.5 |
| 25 | 135 | 6.75 |
| 26 | 140 | 7 |
| 27 | 145 | 7.25 |
| 28 | 150 | 7.5 |
| 29 | 155 | 7.75 |
| 30 | 160 | 8 |
| 31 | 165 | 8.25 |
| 32 | 170 | 8.5 |
| 33 | 175 | 8.75 |
| 34 | 180 | 9 |
| 35 | 185 | 9.25 |
| 36 | 190 | 9.5 |
| 37 | 195 | 9.75 |
| 38 | 200 | 10 |
| 39 | 205 | 10.25 |
| 40 | 210 | 10.5 |
| 41 | 215 | 10.75 |
| 42 | 220 | 11 |
| 43 | 225 | 11.25 |
| 44 | 230 | 11.5 |
| 45 | 235 | 11.75 |
| 46 | 240 | 12 |
| 47 | 245 | 12.25 |
| 48 | 250 | 12.5 |
| 49 | 255 | 12.75 |
| 50 | 260 | 13 |

### Example 37

### High-Throughput Screening Assay Identifying Changes in Small Molecule Concentration and Membrane Permeability

[1160] Binding of a ligand to a receptor is known to alter intracellular levels of small molecules, such as calcium, potassium, sodium, and pH, as well as alter membrane potential. These alterations can be measured in an assay to identify supernatants which bind to receptors of a particular cell. Although the following protocol describes an assay for calcium, this protocol can easily be modified to detect changes in potassium, sodium, pH, membrane potential, or any other small molecule which is detectable by a fluorescent probe.

[1161] The following assay uses Fluorometric Imaging Plate Reader (“FLIPR”) to measure changes in fluorescent molecules (Molecular Probes) that bind small molecules. Clearly, any fluorescent molecule detecting a small molecule can be used instead of the calcium fluorescent molecule, fluo-4 (Molecular Probes, Inc.; catalog no. F-14202), used here.

[1162] For adherent cells, seed the cells at 10,000-20,000 cells/well in a Co-star black 96-well plate with clear bottom. The plate is incubated in a CO₂ incubator for 20 hours. The adherent cells are washed two times in Biotek washer with 200 ul of HBSS (Hank's Balanced Salt Solution) leaving 100 ul of buffer after the final wash.

[1163] A stock solution of 1 mg/ml fluo-4 is made in 10% pluronic acid DMSO. To load the cells with fluo-4, 50 ul of 12 ug/ml fluo-4 is added to each well. The plate is incubated at 37 degrees C. in a CO₂ incubator for 60 min. The plate is washed four times in the Biotek washer with HBSS leaving 100 ul of buffer.

[1164] For non-adherent cells, the cells are spun down from culture media. Cells are re-suspended to 2-5×10⁶ cells/ml with HBSS in a 50-ml conical tube. 4 ul of 1 mg/ml fluo-4 solution in 10% pluronic acid DMSO is added to each ml of cell suspension. The tube is then placed in a 37 degrees C. water bath for 30-60 min. The cells are washed twice with HBSS, resuspended to 1×10⁶ cells/ml, and dispensed into a microplate, 100 ul/well. The plate is centrifuged at 1000 rpm for 5 min. The plate is then washed once in Denley Cell Wash with 200 ul, followed by an aspiration step to 100 ul final volume.

[1165] For a non-cell based assay, each well contains a fluorescent molecule, such as fluo-4. The supernatant is added to the well, and a change in fluorescence is detected.

[1166] To measure the fluorescence of intracellular calcium, the FLIPR is set for the following parameters: (1) System gain is 300-800 mW; (2) Exposure time is 0.4 second; (3) Camera F/stop is F/2; (4) Excitation is 488 nm; (5) Emission is 530 nm; and (6) Sample addition is 50 ul. Increased emission at 530 nm indicates an extracellular signaling event caused by the a molecule, either polypeptide of the present invention or a molecule induced by polypeptide of the present invention, which has resulted in an increase in the intracellular Ca⁺⁺ concentration.

### Example 38

### High-Throughput Screening Assay Identifying Tyrosine Kinase Activity

[1167] The Protein Tyrosine Kinases (PTK) represent a diverse group of transmembrane and cytoplasmic kinases. Within the Receptor Protein Tyrosine Kinase RPTK) group are receptors for a range of mitogenic and metabolic growth factors including the PDGF, FGF, EGF, NGF, HGF and Insulin receptor subfamilies. In addition there are a large family of RPTKs for which the corresponding ligand is unknown. Ligands for RPTKs include mainly secreted small proteins, but also membrane-bound and extracellular matrix proteins.

[1168] Activation of RPTK by ligands involves ligand-mediated receptor dimerization, resulting in transphosphorylation of the receptor subunits and activation of the cytoplasmic tyrosine kinases. The cytoplasmic tyrosine kinases include receptor associated tyrosine kinases of the src-family (e.g., src, yes, lck, lyn, fyn) and non-receptor linked and cytosolic protein tyrosine kinases, such as the Jak family, members of which mediate signal transduction triggered by the cytokine superfamily of receptors (e.g., the Interleukins, Interferons, GM-CSF, and Leptin).

[1169] Because of the wide range of known factors capable of stimulating tyrosine kinase activity, identifying whether polypeptide of the present invention or a molecule induced by polypeptide of the present invention is capable of activating tyrosine kinase signal transduction pathways is of interest. Therefore, the following protocol is designed to identify such molecules capable of activating the tyrosine kinase signal transduction pathways.

[1170] Seed target cells (e.g., primary keratinocytes) at a density of approximately 25,000 cells per well in a 96 well Loprodyne Silent Screen Plates purchased from Nalge Nunc (Naperville, Ill.). The plates are sterilized with two 30 minute rinses with 100% ethanol, rinsed with water and dried overnight. Some plates are coated for 2 hr with 100 ml of cell culture grade type I collagen (50 mg/ml), gelatin (2%) or polylysine (50 mg/ml), all of which can be purchased from Sigma Chemicals (St. Louis, Mo.) or 10% Matrigel purchased from Becton Dickinson (Bedford, Mass.), or calf serum, rinsed with PBS and stored at 4 degree C. Cell growth on these plates is assayed by seeding 5,000 cells/well in growth medium and indirect quantitation of cell number through use of alamarBlue as described by the manufacturer Alamar Biosciences, Inc. (Sacramento, Calif.) after 48 hr. Falcon plate covers #3071 from Becton Dickinson (Bedford, Mass.) are used to cover the Loprodyne Silent Screen Plates. Falcon Microtest III cell culture plates can also be used in some proliferation experiments.

[1171] To prepare extracts, A431 cells are seeded onto the nylon membranes of Loprodyne plates (20,000/200 ml/well) and cultured overnight in complete medium. Cells are quiesced by incubation in serum-free basal medium for 24 hr. After 5-20 minutes treatment with EGF (60 ng/ml) or 50 ul of the supernatant produced in Example 30, the medium was removed and 100 ml of extraction buffer ((20 mM HEPES pH 7.5, 0.15 M NaCl, 1% Triton X-100, 0.1% SDS, 2 mM Na3VO4, 2 mM Na4P2O7 and a cocktail of protease inhibitors (#1836170) obtained from Boehringer Mannheim (Indianapolis, Ind.) is added to each well and the plate is shaken on a rotating shaker for 5 minutes at 4° C. The plate is then placed in a vacuum transfer manifold and the extract filtered through the 0.45 mm membrane bottoms of each well using house vacuum. Extracts are collected in a 96-well catch/assay plate in the bottom of the vacuum manifold and immediately placed on ice. To obtain extracts clarified by centrifugation, the content of each well, after detergent solubilization for 5 minutes, is removed and centrifuged for 15 minutes at 4 degree C. at 16,000×g.

[1172] Test the filtered extracts for levels of tyrosine kinase activity. Although many methods of detecting tyrosine kinase activity are known, one method is described here.

[1173] Generally, the tyrosine kinase activity of a supernatant is evaluated by determining its ability to phosphorylate a tyrosine residue on a specific substrate (a biotinylated peptide). Biotinylated peptides that can be used for this purpose include PSK1 (corresponding to amino acids 6-20 of the cell division kinase cdc2-p34) and PSK2 (corresponding to amino acids 1-17 of gastrin). Both peptides are substrates for a range of tyrosine kinases and are available from Boehringer Mannheim.

[1174] The tyrosine kinase reaction is set up by adding the following components in order. First, add 10 ul of 5 uM Biotinylated Peptide, then 10 ul ATP/Mg₂₊ (5 mM ATP/50 mM MgCl₂), then 10 ul of 5×Assay Buffer (40 mM imidazole hydrochloride, pH7.3, 40 mM beta-glycerophosphate, 1 mM EGTA, 100 mM MgCl₂, 5 mM MnCl₂, 0.5 mg/ml BSA), then 5 ul of Sodium Vanadate (1 mM), and then 5 ul of water. Mix the components gently and preincubate the reaction mix at 30 degree C. for 2 min. Initial the reaction by adding 10 ul of the control enzyme or the filtered supernatant.

[1175] The tyrosine kinase assay reaction is then terminated by adding 10 ul of 120 mm EDTA and place the reactions on ice.

[1176] Tyrosine kinase activity is determined by transferring 50 ul aliquot of reaction mixture to a microtiter plate (MFP) module and incubating at 37 degree C. for 20 min. This allows the streptavadin coated 96 well plate to associate with the biotinylated peptide. Wash the MTP module with 300 ul/well of PBS four times. Next add 75 ul of anti-phospotyrosine antibody conjugated to horse radish peroxidase(anti-P-Tyr-POD (0.5 u/ml)) to each well and incubate at 37 degree C. for one hour. Wash the well as above.

[1177] Next add 100 ul of peroxidase substrate solution (Boehringer Mannheim) and incubate at room temperature for at least 5 mins (up to 30 min). Measure the absorbance of the sample at 405 nm by using ELISA reader. The level of bound peroxidase activity is quantitated using an ELISA reader and reflects the level of tyrosine kinase activity.

### Example 39

### High-Throughput Screening Assay Identifying Phosphorylation Activity

[1178] As a potential alternative and/or compliment to the assay of protein tyrosine kinase activity described in Example 38, an assay which detects activation (phosphorylation) of major intracellular signal transduction intermediates can also be used. For example, as described below one particular assay can detect tyrosine phosphorylation of the Erk-1 and Erk-2 kinases. However, phosphorylation of other molecules, such as Raf, JNK, p38 MAP, Map kinase kinase (MEK), MEK kinase, Src, Muscle specific kinase (MuSK), IRAK, Tec, and Janus, as well as any other phosphoserine, phosphotyrosine, or phosphothreonine molecule, can be detected by substituting these molecules for Erk-1 or Erk-2 in the following assay.

[1179] Specifically, assay plates are made by coating the wells of a 96-well ELISA plate with 0.1 ml of protein G (1 ug/ml) for 2 hr at room temp, (RT). The plates are then rinsed with PBS and blocked with 3% BSA/PBS for 1 hr at RT. The protein G plates are then treated with 2 commercial monoclonal antibodies (100 ng/well) against Erk-1 and Erk-2 (1 hr at RT) (Santa Cruz Biotechnology). (To detect other molecules, this step can easily be modified by substituting a monoclonal antibody detecting any of the above described molecules.) After 3-5 rinses with PBS, the plates are stored at 4 degree C. until use.

[1180] A431 cells are seeded at 20,000/well in a 96-well Loprodyne filterplate and cultured overnight in growth medium. The cells are then starved for 48 hr in basal medium (DMEM) and then treated with EGF (6 ng/well) or 50 ul of the supernatants obtained in Example 30 for 5-20 minutes. The cells are then solubilized and extracts filtered directly into the assay plate.

[1181] After incubation with the extract for 1 hr at RT, the wells are again rinsed. As a positive control, a commercial preparation of MAP kinase (10 ng/well) is used in place of A431 extract. Plates are then treated with a commercial polyclonal (rabbit) antibody (1 ug/ml) which specifically recognizes the phosphorylated epitope of the Erk-1 and Erk-2 kinases (1 hr at RT). This antibody is biotinylated by standard procedures. The bound polyclonal antibody is then quantitated by successive incubations with Europium-streptavidin and Europium fluorescence enhancing reagent in the Wallac DELFIA instrument (time-resolved fluorescence). An increased fluorescent signal over background indicates a phosphorylation by polypeptide of the present invention or a molecule induced by polypeptide of the present invention.

### Example 40

### Assay for the Stimulation of Bone Marrow CD34+ Cell Proliferation

[1182] This assay is based on the ability of human CD34+ to proliferate in the presence of hematopoietic growth factors and evaluates the ability of isolated polypeptides expressed in mammalian cells to stimulate proliferation of CD34+ cells.

[1183] It has been previously shown that most mature precursors will respond to only a single signal. More immature precursors require at least two signals to respond. Therefore, to test the effect of polypeptides on hematopoietic activity of a wide range of progenitor cells, the assay contains a given polypeptide in the presence or absence of other hematopoietic growth factors. Isolated cells are cultured for 5 days in the presence of Stem Cell Factor (SCF) in combination with tested sample. SCF alone has a very limited effect on the proliferation of bone marrow (BM) cells, acting in such conditions only as a “survival” factor. However, combined with any factor exhibiting stimulatory effect on these cells (e.g., IL-3), SCF will cause a synergistic effect. Therefore, if the tested polypeptide has a stimulatory effect on a hematopoietic progenitors, such activity can be easily detected. Since normal BM cells have a low level of cycling cells, it is likely that any inhibitory effect of a given polypeptide, or agonists or antagonists thereof, might not be detected. Accordingly, assays for an inhibitory effect on progenitors is preferably tested in cells that are first subjected to in vitro stimulation with SCF+IL+3, and then contacted with the compound that is being evaluated for inhibition of such induced proliferation.

[1184] Briefly, CD34+ cells are isolated using methods known in the art. The cells are thawed and resuspended in medium (QBSF 60 serum-free medium with 1% L-glutamine (500 ml) Quality Biological, Inc., Gaithersburg, Md. Cat#160-204-101). After several gentle centrifugation steps at 200×g, cells are allowed to rest for one hour. The cell count is adjusted to 2.5×10⁵ cells/ml. During this time, 100 μl of sterile water is added to the peripheral wells of a 96-well plate. The cytokines that can be tested with a given polypeptide in this assay is rhSCF (R&D Systems, Minneapolis, Minn., Cat#255-SC) at 50 ng/ml alone and in combination with rhSCF and rhIL-3 (R&D Systems, Minneapolis, Minn., Cat#203-ML) at 30 ng/ml. After one hour, 10 μl of prepared cytokines, 50 μl of the supernatants prepared in Example 30 (supernatants at 1:2 dilution=50 μl) and 20 μl of diluted cells are added to the media which is already present in the wells to allow for a final total volume of 100 μl. The plates are then placed in a 37° C./5% CO₂ incubator for five days.

[1185] Eighteen hours before the assay is harvested, 0.5 μCi/well of [3H] Thymidine is added in a 10 μl volume to each well to determine the proliferation rate. The experiment is terminated by harvesting the cells from each 96-well plate to a filtermat using the Tomtec Harvester 96. After harvesting, the filtermats are dried, trimmed and placed into OmniFilter assemblies consisting of one OmniFilter plate and one OmniFilter Tray. 60 μl Microscint is added to each well and the plate sealed with TopSeal-A press-on sealing film A bar code 15 sticker is affixed to the first plate for counting. The sealed plates is then loaded and the level of radioactivity determined via the Packard Top Count and the printed data collected for analysis. The level of radioactivity reflects the amount of cell proliferation.

[1186] The studies described in this example test the activity of a given polypeptide to stimulate bone marrow CD34+ cell proliferation. One skilled in the art could easily modify the exemplified studies to test the activity of polynucleotides (e.g., gene therapy), antibodies, agonists, and/or antagonists and fragments and variants thereof. As a nonlimiting example, potential antagonists tested in this assay would be expected to inhibit cell proliferation in the presence of cytokines and/or to increase the inhibition of cell proliferation in the presence of cytokines and a given polypeptide. In contrast, potential agonists tested in this assay would be expected to enhance cell proliferation and/or to decrease the inhibition of cell proliferation in the presence of cytokines and a given polypeptide.

[1187] The ability of a gene to stimulate the proliferation of bone marrow CD34+ cells indicates that polynucleotides and polypeptides corresponding to the gene are useful for the diagnosis and treatment of disorders affecting the immune system and hematopoiesis. Representative uses are described in the “Immune Activity” and “Infectious Disease” sections above, and elsewhere herein.

### Example 41

### Assay for Extracellular Matrix Enhanced Cell Response (EMECR)

[1188] The objective of the Extracellular Matrix Enhanced Cell Response (EMECR) assay is to identify gene products (e.g., isolated polypeptides) that act on the hematopoietic stem cells in the context of the extracellular matrix (ECM) induced signal.

[1189] Cells respond to the regulatory factors in the context of signal(s) received from the surrounding microenvironment. For example, fibroblasts, and endothelial and epithelial stem cells fail to replicate in the absence of signals from the ECM. Hematopoietic stem cells can undergo self-renewal in the bone marrow, but not in in vitro suspension culture. The ability of stem cells to undergo self-renewal in vitro is dependent upon their interaction with the stromal cells and the ECM protein fibronectin (fn). Adhesion of cells to fn is mediated by the α₅.β₁ and α₄.β₁ integrin receptors, which are expressed by human and mouse hematopoietic stem cells. The factor(s) which integrate with the ECM environment and responsible for stimulating stem cell self-renewal has not yet been identified. Discovery of such factors should be of great interest in gene therapy and bone marrow transplant applications

[1190] Briefly, polystyrene, non tissue culture treated, 96-well plates are coated with fn fragment at a coating concentration of 0.2 μg/ cm². Mouse bone marrow cells are plated (1,000 cells/well ) in 0.2 ml of serum-free medium. Cells cultured in the presence of IL-3 (5 ng/ml )+SCF (50 ng/ml ) would serve as the positive control, conditions under which little self-renewal but pronounced differentiation of the stem cells is to be expected. Gene products of the invention (e.g., including, but not limited to, polynucleotides and polypeptides of the present invention, and supernatants produced in Example 30), are tested with appropriate negative controls in the presence and absence of SCF (5.0 ng/ml), where test factor supernates represent 10% of the total assay volume. The plated cells are then allowed to grow by incubating in a low oxygen environment (5% CO₂, 7% O₂, and 88% N₂) tissue culture incubator for 7 days. The number of proliferating cells within the wells is then quantitated by measuring thymidine incorporation into cellular DNA. Verification of the positive hits in the assay will require phenotypic characterization of the cells, which can be accomplished by scaling up of the culture system and using appropriate antibody reagents against cell surface antigens and FACScan.

[1191] One skilled in the art could easily modify the exemplified studies to test the activity of polynucleotides (e.g., gene therapy), antibodies, agonists, and/or antagonists and fragments and variants thereof.

[1192] If a particular polypeptide of the present invention is found to be a stimulator of hematopoietic progenitors, polynucleotides and polypeptides corresponding to the gene encoding said polypeptide may be useful for the diagnosis and treatment of disorders affecting the immune system and hematopoiesis. Representative uses are described in the “Immune Activity” and “Infectious Disease” sections above, and elsewhere herein. The gene product may also be useful in the expansion of stem cells and committed progenitors of various blood lineages, and in the differentiation and/or proliferation of various cell types.

[1193] Additionally, the polynucleotides and/or polypeptides of the gene of interest and/or agonists and/or antagonists thereof, may also be employed to inhibit the proliferation and differentiation of hematopoietic cells and therefore may be employed to protect bone marrow stem cells from chemotherapeutic agents during chemotherapy. This antiproliferative effect may allow administration of higher doses of chemotherapeutic agents and, therefore, more effective chemotherapeutic treatment.

[1194] Moreover, polynucleotides and polypeptides corresponding to the gene of interest may also be useful for the treatment and diagnosis of hematopoietic related disorders such as, for example, anemia, pancytopenia, leukopenia, thrombocytopenia or leukemia since stromal cells are important in the production of cells of hematopoietic lineages. The uses include bone marrow cell ex-vivo culture, bone marrow transplantation, bone marrow reconstitution, radiotherapy or chemotherapy of neoplasia.

### Example 42

### Human Dermal Fibroblast and Aortic Smooth Muscle Cell Proliferation

[1195] The polypeptide of interest is added to cultures of normal human dermal fibroblasts (NHDF) and human aortic smooth muscle cells (AoSMC) and two co-assays are performed with each sample. The first assay examines the effect of the polypeptide of interest on the proliferation of normal human dermal fibroblasts (NHDF) or aortic smooth muscle cells (AoSMC). Aberrant growth of fibroblasts or smooth muscle cells is a part of several pathological processes, including fibrosis, and restenosis. The second assay examines IL6 production by both NHDF and SMC. IL6 production is an indication of functional activation. Activated cells will have increased production of a number of cytokines and other factors, which can result in a proinflammatory or immunomodulatory outcome. Assays are run with and without co-TNFa stimulation, in order to check for costimulatory or inhibitory activity.

[1196] Briefly, on day 1, 96-well black plates are set up with 1000 cells/well (NHDF) or 2000 cells/well (AoSMC) in 100 μl culture media. NHDF culture media contains: Clonetics FB basal media, 1 mg/ml hFGF, 5 mg/ml insulin, 50 mg/ml gentamycin, 2% FBS, while AoSMC culture media contains Clonetics SM basal media, 0.5 μg/ml hEGF, 5 mg/ml insulin, 1 μg/ml hFGF, 50 mg/ml gentamycin, 50 μg/ml Amphotericin B, 5% FBS. After incubation at 37° C. for at least 4-5 hours, culture media is aspirated and replaced with growth arrest media. Growth arrest media for NHDF contains fibroblast basal media, 50 mg/ml gentamycin, 2% FBS, while growth arrest media for AoSMC contains SM basal media, 50 mg/ml gentamycin, 50 μg/ml Amphotericin B, 0.4% FBS. Incubate at 37° C. until day 2.

[1197] On day 2, serial dilutions and templates of the polypeptide of interest are designed such that they always include media controls and known-protein controls. For both stimulation and inhibition experiments, proteins are diluted in growth arrest media. For inhibition experiments, TNFa is added to a final concentration of 2 ng/ml (NHDF) or 5 ng/ml (AoSMC). Add 113 vol media containing controls or polypeptides of the present invention and incubate at 37° C./5% CO₂ until day 5.

[1198] Transfer 60 μl from each well to another labeled 96-well plate, cover with a plate-sealer, and store at 4° C. until Day 6 (for IL6 ELISA). To the remaining 100 μl in the cell culture plate, aseptically add Alamar Blue in an amount equal to 10% of the culture volume (10 μl). Return plates to incubator for 3 to 4 hours. Then measure fluorescence with excitation at 530 nm and emission at 590 nm using the CytoFluor. This yields the growth stimulation/inhibition data.

[1199] On day 5, the IL6 ELISA is performed by coating a 96 well plate with 50-100 ul/well of Anti-Human IL6 Monoclonal antibody diluted in PBS, pH 7.4, incubate ON at room temperature.

[1200] On day 6, empty the plates into the sink and blot on paper towels. Prepare Assay Buffer containing PBS with 4% BSA. Block the plates with 200 μl/well of Pierce Super Block blocking buffer in PBS for 1-2 hr and then wash plates with wash buffer (PBS, 0.05% Tween-20). Blot plates on paper towels. Then add 50 μl/well of diluted Anti-Human IL-6 Monoclonal, Biotin-labeled antibody at 0.50 mg/ml. Make dilutions of IL-6 stock in media (30, 10, 3, 1, 0.3, 0 ng/ml). Add duplicate samples to top row of plate. Cover the plates and incubate for 2 hours at RT on shaker. Plates are washed with wash buffer and blotted on paper towels. Dilute EU-labeled Streptavidin 1:1000 in Assay buffer, and add 100 μl/well. Cover the plate and incubate 1 h at RT. Plates are again washed with wash buffer and blotted on paper towels. Add 100 μl/well of Enhancement Solution and shake for 5 minutes. Read the plate on the Wallac DELFIA Fluorometer. Readings from triplicate samples in each assay are tabulated and averaged.

[1201] A positive result in this assay suggests AoSMC cell proliferation and that the polypeptide of the present invention may be involved in dermal fibroblast proliferation and/or smooth muscle cell proliferation. A positive result also suggests many potential uses of polypeptides, polynucleotides, agonists and/or antagonists of the polynucleotide/polypeptide of the present invention which gives a positive result. For example, inflammation and immune responses, wound healing, and angiogenesis, as detailed throughout this specification. Particularly, polypeptides of the present invention and polynucleotides of the present invention may be used in wound healing and dermal regeneration, as well as the promotion of vasculargenesis, both of the blood vessels and lymphatics. The growth of vessels can be used in the treatment of, for example, cardiovascular diseases. Additionally, antagonists of polypeptides and polynucleotides of the invention may be useful in treating diseases, disorders, and/or conditions which involve angiogenesis by acting as an anti-vascular (e.g., anti-angiogenesis). These diseases, disorders, and/or conditions are known in the art and/or are described herein, such as, for example, malignancies, solid tumors, benign tumors, for example hemangiomas, acoustic neuromas, neurofibromas, trachomas, and pyogenic granulomas; artheroscleric plaques; ocular angiogenic diseases, for example, diabetic retinopathy, retinopathy of prematurity, macular degeneration, corneal graft rejection, neovascular glaucoma, retrolental fibroplasia, rubeosis, retinoblastoma, uvietis and Pterygia (abnormal blood vessel growth) of the eye; rheumatoid arthritis; psoriasis; delayed wound healing; endometriosis; vasculogenesis; granulations; hypertrophic scars (keloids); nonunion fractures; scleroderma; trachoma; vascular adhesions; myocardial angiogenesis; coronary collaterals; cerebral collaterals; arteriovenous malformations; ischemic limb angiogenesis; Osler-Webber Syndrome; plaque neovascularization; telangiectasia; hemophiliac joints; angiofibroma; fibromuscular dysplasia; wound granulation; Crohn's disease; and atherosclerosis. Moreover, antagonists of polypeptides and polynucleotides of the invention may be useful in treating anti-hyperproliferative diseases and/or anti-inflammatory known in the art and/or described herein.

[1202] One skilled in the art could easily modify the exemplified studies to test the activity of polynucleotides (e.g., gene therapy), antibodies, agonists, and/or antagonists and fragments and variants thereof.

### Example 43

### Cellular Adhesion Molecule (CAM) Expression on Endothelial Cells

[1203] The recruitment of lymphocytes to areas of inflammation and angiogenesis involves specific receptor-ligand interactions between cell surface adhesion molecules (CAMs) on lymphocytes and the vascular endothelium. The adhesion process, in both normal and pathological settings, follows a multi-step cascade that involves intercellular adhesion molecule-1 (ICAM-1), vascular cell adhesion molecule-1 (VCAM-1), and endothelial leukocyte adhesion molecule-1 (E-selectin) expression on endothelial cells (EC). The expression of these molecules and others on the vascular endothelium determines the efficiency with which leukocytes may adhere to the local vasculature and extravasate into the local tissue during the development of an inflammatory response. The local concentration of cytokines and growth factor participate in the modulation of the expression of these CAMs.

[1204] Briefly, endothelial cells (e.g., Human Umbilical Vein Endothelial cells (HUVECs)) are grown in a standard 96 well plate to confluence, growth medium is removed from the cells and replaced with 100 μl of 199 Medium (10% fetal bovine serum (FBS)). Samples for testing and positive or negative controls are added to the plate in triplicate (in 10 μl volumes). Plates are then incubated at 37° C. for either 5 h (selectin and integrin expression) or 24 h (integrin expression only). Plates are aspirated to remove medium and 100 μl of 0.1% paraformaldehyde-PBS (with Ca++ and Mg++) is added to each well. Plates are held at 4° C. for 30 min. Fixative is removed from the wells and wells are washed 1× with PBS(+Ca,Mg)+0.5% BSA and drained. 10 μl of diluted primary antibody is added to the test and control wells. Anti-ICAM-1-Biotin, Anti-VCAM-1-Biotin and Anti-E-selectin-Biotin are used at a concentration of 10 μg/ml (1:10 dilution of 0.1 mg/ml stock antibody). Cells are incubated at 37° C. for 30 min. in a humidified environment. Wells are washed three times with PBS(+Ca,Mg)+0.5% BSA. 20 μl of diluted ExtrAvidin-Alkaline Phosphotase (1:5,000 dilution, referred to herein as the working dilution) are added to each well and incubated at 37° C. for 30 min. Wells are washed three times with PBS(+Ca,Mg)+0.5% BSA. Dissolve 1 tablet of p-Nitrophenol Phosphate pNPP per 5 ml of glycine buffer (pH 10.4). 100 μl of pNPP substrate in glycine buffer is added to each test well. Standard wells in triplicate are prepared from the working dilution of the ExtrAvidin-Alkaline Phosphotase in glycine buffer: 1:5,000 (10⁰)>10⁻⁵>10⁻¹>10^{-1.5}. 5 μl of each dilution is added to triplicate wells and the resulting AP content in each well is 5.50 ng, 1.74 ng, 0.55 ng, 0.18 ng. 100 μl of pNNP reagent is then added to each of the standard wells. The plate is incubated at 37° C. for 4 h. A volume of 50 μl of 3M NaOH is added to all wells. The plate is read on a plate reader at 405 nm using the background subtraction option on blank wells filled with glycine buffer only. Additionally, the template is set up to indicate the concentration of AP-conjugate in each standard well [ 5.50 ng; 1.74 ng; 0.55 ng; 0.18 ng]. Results are indicated as amount of bound AP-conjugate in each sample.

### Example 44

### Alamar Blue Endothelial Cells Proliferation Assay

[1205] This assay may be used to quantitatively determine protein mediated inhibition of bFGF-induced proliferation of Bovine Lymphatic Endothelial Cells (LECs), Bovine Aortic Endothelial Cells (BAECs) or Human Microvascular Uterine Myometrial Cells (UTMECs). This assay incorporates a fluorometric growth indicator based on detection of metabolic activity. A standard Alamar Blue Proliferation Assay is prepared in EGM-2MV with 10 ng /ml of bFGF added as a source of endothelial cell stimulation. This assay may be used with a variety of endothelial cells with slight changes in growth medium and cell concentration. Dilutions of the protein batches to be tested are diluted as appropriate. Serum-free medium (GIBCO SFM) without bFGF is used as a non-stimulated control and Angiostatin or TSP-1 are included as a known inhibitory controls.

[1206] Briefly, LEC, BAECs or UTMECs are seeded in growth media at a density of 5000 to 2000 cells/well in a 96 well plate and placed at 37-C. overnight. After the overnight incubation of the cells, the growth media is removed and replaced with GIBCO EC-SFM. The cells are treated with the appropriate dilutions of the protein of interest or control protein sample(s) (prepared in SFM ) in triplicate wells with additional bFGF to a concentration of 10 ng/ ml. Once the cells have been treated with the samples, the plate(s) is/are placed back in the 37° C. incubator for three days. After three days 10 ml of stock alamar blue (Biosource Cat#DAL1100) is added to each well and the plate(s) is/are placed back in the 37° C. incubator for four hours. The plate(s) are then read at 530 nm excitation and 590 nm emission using the CytoFluor fluorescence reader. Direct output is recorded in relative fluorescence units.

[1207] Alamar blue is an oxidation-reduction indicator that both fluoresces and changes color in response to chemical reduction of growth medium resulting from cell growth. As cells grow in culture, innate metabolic activity results in a chemical reduction of the immediate surrounding environment. Reduction related to growth causes the indicator to change from oxidized (non-fluorescent blue) form to reduced (fluorescent red) form. i.e. stimulated proliferation will produce a stronger signal and inhibited proliferation will produce a weaker signal and the total signal is proportional to the total number of cells as well as their metabolic activity. The background level of activity is observed with the starvation medium alone. This is compared to the output observed from the positive control samples (bFGF in growth medium) and protein dilutions.

### Example 45

### Detection of Inhibition of a Mixed Lymphocyte Reaction

[1208] This assay can be used to detect and evaluate inhibition of a Mixed Lymphocyte Reaction (MLR) by gene products (e.g., isolated polypeptides). Inhibition of a MLR may be due to a direct effect on cell proliferation and viability, modulation of costimulatory molecules on interacting cells, modulation of adhesiveness between lymphocytes and accessory cells, or modulation of cytokine production by accessory cells. Multiple cells may be targeted by these polypeptides since the peripheral blood mononuclear fraction used in this assay includes T, B and natural killer lymphocytes, as well as monocytes and dendritic cells.

[1209] Polypeptides of interest found to inhibit the MLR may find application in diseases associated with lymphocyte and monocyte activation or proliferation. These include, but are not limited to, diseases such as asthma, arthritis, diabetes, inflammatory skin conditions, psoriasis, eczema, systemic lupus erythematosus, multiple sclerosis, glomerulonephritis, inflammatory bowel disease, crohn's disease, ulcerative colitis, arteriosclerosis, cirrhosis, graft vs. host disease, host vs. graft disease, hepatitis, leukemia and lymphoma.

[1210] Briefly, PBMCs from human donors are purified by density gradient centrifugation using Lymphocyte Separation Medium (LSM®, density 1.0770 g/ml, Organon Teknika Corporation, West Chester, Pa.). PBMCs from two donors are adjusted to 2×10⁶ cells/ml in RPMI-1640 (Life Technologies, Grand Island, N.Y.) supplemented with 10% FCS and 2 mM glutamine. PBMCs from a third donor is adjusted to 2×10⁵ cells/ml. Fifty microliters of PBMCs from each donor is added to wells of a 96-well round bottom microtiter plate. Dilutions of test materials (50 μl) is added in triplicate to microtiter wells. Test samples (of the protein of interest) are added for final dilution of 1:4; rhuIL-2 (R&D Systems, Minneapolis, Minn., catalog number 202-IL) is added to a final concentration of 1 μg/ml; anti-CD4 mAb (R&D Systems, clone 34930.11, catalog number MAB379) is added to a final concentration of 10 μg/ml. Cells are cultured for 7-8 days at 37° C. in 5% CO₂, and 1 μC of [³H] thymidine is added to wells for the last 16 hrs of culture. Cells are harvested and thymidine incorporation determined using a Packard TopCount. Data is expressed as the mean and standard deviation of triplicate determinations.

[1211] Samples of the protein of interest are screened in separate experiments and compared to the negative control treatment, anti-CD4 mAb, which inhibits proliferation of lymphocytes and the positive control treatment, IL-2 (either as recombinant material or supernatant), which enhances proliferation of lymphocytes.

[1212] One skilled in the art could easily modify the exemplified studies to test the activity of polynucleotides (e.g., gene therapy), antibodies, agonists, and/or antagonists and fragments and variants thereof.

[1213] It will be clear that the invention may be practiced otherwise than as particularly described in the foregoing description and examples. Numerous modifications and variations of the present invention are possible in light of the above teachings and, therefore, are within the scope of the appended claims.

[1214] The entire disclosure of each document cited (including patents, patent applications, journal articles, abstracts, laboratory manuals, books, or other disclosures) in the Background of the Invention, Detailed Description, and Examples is hereby incorporated herein by reference. Further, the paper copy on CD-ROM of the sequence listing submitted herewith and the corresponding computer readable form on CD-ROM are both incorporated herein by reference in their entireties. Moreover, the hard copy of and the corresponding computer readable form of the Sequence Listing of Ser. No. 60/124,270 and International Application No. PCT/US00/05989 are also incorporated herein by reference in their entireties.

What is claimed is:

1. An isolated nucleic acid molecule comprising a polynucleotide having a nucleotide sequence at least 95% identical to a sequence selected from the group consisting of:
(a) a polynucleotide fragment of SEQ ID NO:X or a polynucleotide fragment of the cDNA sequence included in the related cDNA clone, which is hybridizable to SEQ ID NO:X;
(b) a polynucleotide encoding a polypeptide fragment of SEQ ID NO:Y or a polypeptide fragment encoded by the cDNA sequence included in the related cDNA clone, which is hybridizable to SEQ ID NO:X;
(c) a polynucleotide encoding a polypeptide fragment of a polypeptide encoded by SEQ ID NO:X or a polypeptide fragment encoded by the cDNA sequence included in the related cDNA clone, which is hybridizable to SEQ ID NO:X;
(d) a polynucleotide encoding a polypeptide domain of SEQ ID NO:Y or a polypeptide domain encoded by the cDNA sequence included in the related cDNA clone, which is hybridizable to SEQ ID NO:X;
(e) a polynucleotide encoding a polypeptide epitope of SEQ ID NO:Y or a polypeptide epitope encoded by the cDNA sequence included in the related cDNA clone, which is hybridizable to SEQ ID NO:X;
(f) a polynucleotide encoding a polypeptide of SEQ ID NO:Y or the cDNA sequence included in the related cDNA clone, which is hybridizable to SEQ ID NO:X, having biological activity;
(g) a polynucleotide which is a variant of SEQ ID NO:X;
(h) a polynucleotide which is an allelic variant of SEQ ID NO:X;
(i) a polynucleotide which encodes a species homologue of the SEQ ID NO:Y;
(j) a polynucleotide capable of hybridizing under stringent conditions to any one of the polynucleotides specified in (a)-(i), wherein said polynucleotide does not hybridize under stringent conditions to a nucleic acid molecule having a nucleotide sequence of only A residues or of only T residues.

2. The isolated nucleic acid molecule of claim 1, wherein the polynucleotide fragment comprises a nucleotide sequence encoding a protein.

3. The isolated nucleic acid molecule of claim 1, wherein the polynucleotide fragment comprises a nucleotide sequence encoding the sequence identified as SEQ ID NO:Y or the polypeptide encoded by the cDNA sequence included in the related cDNA clone, which is hybridizable to SEQ ID NO:X.

4. The isolated nucleic acid molecule of claim 1, wherein the polynucleotide fragment comprises the entire nucleotide sequence of SEQ ID NO:X or the cDNA sequence included in the related cDNA clone, which is hybridizable to SEQ ID NO:X.

5. The isolated nucleic acid molecule of claim 2, wherein the nucleotide sequence comprises sequential nucleotide deletions from either the C-terminus or the N-terminus.

6. The isolated nucleic acid molecule of claim 3, wherein the nucleotide sequence comprises sequential nucleotide deletions from either the C-terminus or the N-terminus.

7. A recombinant vector comprising the isolated nucleic acid molecule of claim 1.

8. A method of making a recombinant host cell comprising the isolated nucleic acid molecule of claim 1.

9. A recombinant host cell produced by the method of claim 8.

10. The recombinant host cell of claim 9 comprising vector sequences.

11. An isolated polypeptide comprising an amino acid sequence at least 95% identical to a sequence selected from the group consisting of:
(a) a polypeptide fragment of SEQ ID NO:Y or of the sequence encoded by the cDNA included in the related cDNA clone;
(b) a polypeptide fragment of SEQ ID NO:Y or of the sequence encoded by the cDNA included in the related cDNA clone, having biological activity;
(c) a polypeptide domain of SEQ ID NO:Y or of the sequence encoded by the cDNA included in the related cDNA clone;
(d) a polypeptide epitope of SEQ ID NO:Y or of the sequence encoded by the cDNA included in the related cDNA clone;
(e) a full length protein of SEQ ID NO:Y or of the sequence encoded by the cDNA included in the related cDNA clone;
(f) a variant of SEQ ID NO:Y;
(g) an allelic variant of SEQ ID NO:Y; or (h) a species homologue of the SEQ ID NO:Y.

12. The isolated polypeptide of claim 11, wherein the full length protein comprises sequential amino acid deletions from either the C-terminus or the N-terminus.

13. An isolated antibody that binds specifically to the isolated polypeptide of claim 11.

14. A recombinant host cell that expresses the isolated polypeptide of claim 11.

15. A method of making an isolated polypeptide comprising:
(a) culturing the recombinant host cell of claim 14 under conditions such that said polypeptide is expressed; and
(b) recovering said polypeptide.

16. The polypeptide produced by claim 15.

17. A method for preventing, treating, or ameliorating a medical condition, comprising administering to a mammalian subject a therapeutically effective amount of the polypeptide of claim 11 or the polynucleotide of claim 1.

18. A method of diagnosing a pathological condition or a susceptibility to a pathological condition in a subject comprising:
(a) determining the presence or absence of a mutation in the polynucleotide of claim 1; and
(b) diagnosing a pathological condition or a susceptibility to a pathological condition based on the presence or absence of said mutation.

19. A method of diagnosing a pathological condition or a susceptibility to a pathological condition in a subject comprising:
(a) determining the presence or amount of expression of the polypeptide of claim 11 in a biological sample; and
(b) diagnosing a pathological condition or a susceptibility to a pathological condition based on the presence or amount of expression of the polypeptide.

20. A method for identifying a binding partner to the polypeptide of claim 11 comprising:
(a) contacting the polypeptide of claim 11 with a binding partner; and
(b) determining whether the binding partner effects an activity of the polypeptide.

21. The gene corresponding to the cDNA sequence of SEQ ID NO:Y.

22. A method of identifying an activity in a biological assay, wherein the method comprises:
(a) expressing SEQ ID NO:X in a cell;
(b) isolating the supernatant;
(c) detecting an activity in a biological assay; and
(d) identifying the protein in the supernatant having the activity.

23. The product produced by the method of claim 20.

The application's sequence listing, which the Patent Office published only in electronic form, follows.

SEQUENCE LISTING (928 sequences)

SEQ ID NO: 1 - DNA, 565 bp, Homo sapiens
aagcaatcaactggaactcaacaagccttgagttctcaaagggggtgtgggaaggttcttatacatcttctatgaagggcagtttatcagtcactaaattacaaatacataaaccctttgtctcaccaaacctgctgggaatgaatcctacatatatatttatatgtgtgcaggctacatggttttcattatgctattgatkttaaaagtaaaaatttgggaaagaacctccatgtccaccatggggaactggctaagtcatttatggtgggaatggtgatcataaaaattcattaaaaatgaagactctatatacagcttgaatattccttatcgaaatgcttggggaccagaagtgtttcagatctttgcatattttctgtttctcatttcagttcacattttctaagcatgatattcctactgatttccttgtagatattttgaaacagataagaaactcctccgtggaaattactgttaactagggaaaagacatgtttttttctgttcataaaagtaatgcgagttctttgtagcaaaacttggaaaatgcataaaagta

SEQ ID NO: 2 - DNA, 1691 bp, Homo sapiens
  misc feature (1093): n equals a,t,g, or c
aattcggcacgagaggaaaccaagccgggcgcctcttgcaatggagacggtcatttcttcagatagctccccagctgtggaaaatgagcatcctcaagagaccccagaatccaacaatagcgtgtatacttccttcatgaagtctcatcgctgctatgacctgattcccacaagctccaaattggttgtatttgatacgtccctgcaggtgaagaaagctttttttgctttggtgactaacggtgtacgagctgcccctttatgggatagtaagaagcaaagttttgtgggcatgctgaccatcactgatttcatcaatatcctgcaccgctactataaatcagccttggtacagatctatgagctagaagaacacaagatagaaacttggagagaggtgtatctccaggactcctttaaaccgcttgtctgcatttctcctaatgccagcttgtttgatgctgtctcttcattaattcggaacaagatccacaggctgccagttattgacccagaatcaggcaatactttgtacatcctcacccacaagcgcattctgaagttcctcaaattgtttatcactgagttccccaagccagagttcatgtccaagtctctggaagagctacagattggcacctatgccaatattgctatggttcgcactaccacccccgtctatgtggctctggggatttttgtacagcatcgagtctcagccctgccagtggtggatgagaaggggcgtgtggtggacatctactccaagtttgatgttatcaatctggcagcagaaaagacctacaacaacctagatgtatctgtgactaaagccttgcaacatcgatcacattactttgagggtgttctcaagtgctacctgcatgagactctggagaccatcatcaacaggctagtggaagcagaggttcaccgacttgtagtggtggatgaaaatgatgtggtcaagggaattgtatcactgtctgacatcctgcaggccctggtgctcacaggtggagagaagaagccctgagctgggggaaggggtcatgcagcaccaggggatatgcccaactcactgcctgctggnaactctgtgggaatcagatgaaacttgagggaattgtgactctgttccctgttcagggtcccctgcccttctatctgggagctagggaaggtatgggggaggaaagagaatggatttatagctacccttaccctcacacatacacttgaaaaaactttcagcctagccagttctagcccctgtcctcttagatatatccccctttctgggtgaactataggctctgtgcctctcagacaaattctgatctctaagagatccccagacctcacttgcctctgcctccatcttggccctgattcaaccctaagataatagcacaacaaaattcttcataaagatatttttattcacctgttccgtgctatatggaggaggccaagtccatttagtgacatttcttcccataatgtgagtggggaggattgtggggaggaggggctttgggttcctgtgtttgtgcatatgaagggagatgggggttaggtggaggaggagagcagcgtggttagctaaggttattgctttttgtggcaaatctaattaaatgacaggaatctcttcaaaaaaaaaaaaaaaaaaaaaaaaaaaaaaaaaa

SEQ ID NO: 3 - DNA, 480 bp, Homo sapiens
  misc feature (471): n equals a,t,g, or c
agctttagatttggaggttttgcggtactgaggggagttgggggaagaatggaaataccattgacctcctaaaaagttgttacttgcaaagtttgggaggtgacatcaaaaactcaactgcccttacaatagtcattccatccatctgttgcttatttgaattctcatttatttttactttatggcattaaaatacaataaatctgtcaattatgtattttatattagtagtagcttaagattgggtcacttcatttcggtagatataattgttagtattatccttcaggacaaaaagcatctgctaacaacctgtggtttaaaatataggccaactttatgttcaaacattatgttgataatatttttagcagtattacacagtggaggtccaaattggattagacttttgcattgattccaagtttggtaagctagcacaactwtaagtcttgctaaatcttgtggggnacatatttt

SEQ ID NO: 4 - DNA, 608 bp, Homo sapiens
  misc feature (564): n equals a,t,g, or c
  misc feature (578): n equals a,t,g, or c
  misc feature (582): n equals a,t,g, or c
ctaatttcttgtcctatggaagtyctcgctgtctccatctctctcatttttgtgtcacctaatatgttggtacagataagagttagtcacattttyctgactgcatcaaacttttatttgaaatggtactggrtcttagtttctgtgcagaatattctgtgaattttgggaaatgtaagtgagtccacttgcttctggaccaattctgtttcatgtatgttagcatcctagaaacacctagcaatggacctagttcacagtaataggtgcaaagaaagaccaaatggactttgcagtattaaccctttgcagtcgtcatacttagctgctgcctgtaatgctaaaatgattttaatggttgtctggaggcaaagggctgttttttagtatattgccactaaaggacatttatttatatcaaacttttatttttagatattataagcatacagtacataattgatgaaattgatatttactagagatttatggtagagaatggacgacattcaataactgggagcccgagattgtycactttattttaaaaagacaaataatcmnctggacaagacagncacngttggccattataagggagaaatagg

SEQ ID NO: 5 - DNA, 696 bp, Homo sapiens
ggctttacggctgcgagaagacgacagaagggggtctctgggcttttgctctgtcaggctggtggcgttttggtgtcttcgtttgttatggccgctgctgtcgctatggagacagatgatgctggaaatcgacttcggtttcagttggagttggaatttgtgcaatgtttagccaacccaaattaccttaattttcttgcccaaagaggttacttcaaagacaaagcttttgttaattatcttaaatacttgctttactggaaagacccagaatatgccaagtatctaaagtaccctcagtgtttacacatgttagagctgctccaatatgaacacttccgaaaggagctggtgaatgctcagtgtgcgaaatttattgatgaacagcagattctacattggcagcactattcccggaagcggatgcgccttcagcaagccttggcagagcagcaacagcaaaataacacatcgggaaaatgaaaaactggatacaaacgaggcacttaatacatgtatataatgtatttcttttgtacagtgaagacaaaaaaaatgaaaactcttcctatctacctttattatggtagcccctagaacctttagtgtgctttttcatccaactttttattgttaatagactatttctgttaaacctgaattgttctttgatttccctgtggatttgtaaggtgt

SEQ ID NO: 6 - DNA, 292 bp, Homo sapiens
ccactctttgtctaatcaccttctttcttatgcattaaagttattatttcagaagaacatagaaacttttccctgttcagagaaggaaaactgatagagaatttagcctgttcaactaacaaatacagctgttgcaaatattgaatactgatatgttattcacagtaaaaataatcttagttgtaagaagtctatttgaattataaaataaatatatttcatacctgtcatggattaaaaaaattttttttaattgaacccgggaagcggaggttgcggtgagccaagatcg

SEQ ID NO: 7 - DNA, 362 bp, Homo sapiens
  misc feature (66): n equals a,t,g, or c
  misc feature (326): n equals a,t,g, or c
agaaaacatctggagaaaatgacccattggtttcataggaacccattaaaagccacagctcctgtntcttttaattactatggtgtagtcactggcccttctgcttcaaaaatatgcaatgacttgaggtcatccagggcacgactccttgaaactgttcactgatttgagctgtaatccagaaatgatgaagaatgcagcagattcatatttctcacttttacaaggtttcataaattctttgggatggaatctacccaagaaagcaagttacggttatatttcaaaatttccaagtgggactgatacattgcaaggacaggttnccaagtgccccagcaggatgccgtttttttggaatt

SEQ ID NO: 8 - DNA, 405 bp, Homo sapiens
  misc feature (391): n equals a,t,g, or c
  misc feature (402): n equals a,t,g, or c
agccaacggacagtacgtgcaattggcatgtaccagctctactggcctggtggtatgggtcctattgatgttggggaattccttctgccacaatcatttcacttatttcttcctatactgtttcattatagctaactccttcagtctttaattctttaagttgctaatcctttgtgactattttctataccaggtaatgactacagccatttctgtcttatagttaaagggtctacaaaagaatcaacttctgcactcctgcagaaatcaaaacccatggtatttgtgcaagaagtatgatagaccataaatgargtgccttgggtgaacgtctctgagatcaacatgtgcaaataccycaagctctatttggattggttgttcaccagtnattttggggcngat

SEQ ID NO: 9 - DNA, 1027 bp, Homo sapiens
  misc feature (1): n equals a,t,g, or c
  misc feature (2): n equals a,t,g, or c
nnggggggggggcggtgtcaggtcccagcgagccacaggaacggccctgcaggagcagggcggctgccgactcccccaaccaaggaaggagcccctgagtccgcctgcgcctccatccatctgtccgtccagagccggcatccttgcctgtctaaagccttaactaagactcccgccccgggctggccctgtgcagaccttactcaggggatgtttacctggtgctcgggaagggaggggaaggggccggggagggggcacggcaggcgtgtggcagccacacgcaggcggccagggcggccagggacccaaagcaggatgaccacgcacctccacgccactgcctcccccgaatgcatttggaaccaaagtctaaactgagctcgcagcccccgcgccctccctccgcctcccatcccgcttagcgctctggacagatggacgcagscctgtccagcccccagtgcgctcgttccggtccccacagactgccccagccaacgagattgctggaaaccaagtcaggccaggtgggcggacaaaagggccaggtgcggcctggggggaacggatgctccgaggactggactgtttttttcacacatcgttgccgcagcggtgggaaggaaaggcagatgtaaatratgtgttggtttacagggtatatttttgataccttcaatgaattaattcagatgttttacgcaaggaaggacttacccagtattactgctgctgtgcttttgatctctgcttaccgttcaagaggcgtgtgcaggccgacagtcggtgaccccatcactcgcaggaccaagggggcggggactgctggctcacgccccgctgtgtcctccctccctcccttccttgggcagaatgaattcgatgcgtattctgtggccgccatctgcgcagggtggtggtattctgtcatttacacacgtcgttctaattaaaaagcgaattatactccaaaaaaaaaaaaaaaaaaaaaaaaaaaaaaaaaaaaaaaaaaagggggggggac

SEQ ID NO: 10 - DNA, 1515 bp, Homo sapiens
  misc feature (1515): n equals a,t,g, or c
attgagaagcatttctcccctgccccaccccgggggtggacatttctaagcaagataggaagggagcactttctaggctaggagttgggtgcatttgtaccgtgaaaagcattcctcagttgtggcttaatgccagttacgacgctgcctttccggcctgctccagcaagtagctactggttcacgtgcagtttggggctgtgaaacctaggcagaaggcggctgtctgagggctgtccccgcctaggacagggtcaatcgaggaatgccagatgtgcacggtttttggcaaagtagggggcacatttccattatagcaatgttagtgccaccaccttctgaacacagtggggagggctgtgaaggctcatgtgacctggatctgaggtctcctgatagaaatctggacgccaccgggtccaggcctggcctcagacttggccttgtggatgggcyycttacagtatttgctgactagtctcatttttaggtgataagtttttctttaattcctttggttaaagatagtctatttcattggcatatctccccccagtttttgtggctcaaggctggaatatttatgccttaatatatctatggcagacatttaagaatgcgctttatctagctcatggtaactttgcaacgccttagattaaaatgacagtaaatattactaaggcagtattttgaatgagtttgacactgccggcttccttccatccagcgaggtggtgctgacagtgtggacttgagcacacttatgcyaaatgataatgatactgacttctgttgggagctctccaaagaaactggttggttttaagaaaatagtttcaagaagttcaactatattcttttagatattatgtattgttttactctgattaggttactgtgataggcatttattcatattctttctataccactgtcattaatatattaaaaagatgtatgtgttagactatcgaaagggccttattctctctttctcatagactgaccttcttttggaatttctgagtcatttattttccttagctttttccactcaaattaagggcaagcgaaaaagtaataatttggcattctttaagcctacagaatgtgattctttcacttgtttattacactggctcgtggacagaacaatttgaaaagtgaaagaattattttggtaaaagattttgctttacttttcgaagcattatttttttaaagagtgttttactccaacgattgaaacattttcctatttaaatttcatygttagaatcacaggaggcaaaaaatggaacggttgaatgaaattttactctttctgtgaaagaaaatccacagagttgttgcctccgttgtagttggtgggccccgttagcattggatgcctttgccaaatggttcatgtggacacacaaaggcaaacagatctgccatcgatcgcagatttctgtagaaacacggatgttgcatgttgcagattcccttttgcaggtattaaaaatgatn

SEQ ID NO: 11 - DNA, 847 bp, Homo sapiens
  misc feature (766): n equals a,t,g, or c
  misc feature (795): n equals a,t,g, or c
ggtcccgggttgggggggtggagcagcatttcgtcgccgcgggggtgccgggactccggccgcagtgtcgccgccatcacggacttcctgtgggacaagcgcacgggcctcgccgccagaacgatgccgcatcctcgaaggtaccactcctcaragcgaggcagccgggggagttaccgtgaacactatcggagccgaaagcataagcgacgaagaagtcgctcctggtcaagtagtagtgaccggacacgacggcgtcggcgagaggacagctaccatgtccgttctcgaagcagttatgatgatcgttcgtccgaccggagggtgtatgaccggcgatactgtggcagctacagacgcaacgattatagccgggatcggggagatgcctactatgacacagactatcggcattcctatgaatatcagcgggagaacagcagttaccgcagccagcgcamagccggagaagcacagacggcggargargcgcacggarcatttagccgytcatcttcggtgagtgccagcccaggcccttcctctccccactcttctgcaggccctctaggactctggtaagtragcagtatccttgttctcagctgaacattggggcatgaacactgaggtgggcactgagtttgcctactttcttggaagctctccgactcttgaagggccctgggatctgctttggaagatggatgggcacggagcatttgtgaaccccagttgctctccctggcaatgtttgggcttaatngtgttgggaagaagtttttcggcccaagnggtttccaatctttaatggggaccttgcttgtgaaatgcctttttccccaag

SEQ ID NO: 12 - DNA, 506 bp, Homo sapiens
  misc feature (416): n equals a,t,g, or c
  misc feature (486): n equals a,t,g, or c
ggcacaggttagtctagttagtatcggcctgttatctccttttgcgcgacacggtctcagctgttccgcctgaggcgagtgacgctggccgccaacgaggtatacgtactgggaccctcgccctcagtctcgtctccggcgcggctacctgccccgttttccctgtgagttgacctgctccgggccgcgggccgccaatggcaggggccgctccgaccacggccttcgggcaggcggtgatcggcccgccgggytcagggaagaccacgtactgcctgggcatgagtgagttcctgcgcgcgctgggccggcgcgtggcggtggtgaacctggacccggccaacgargggctgccgtacgagtgtgccgtggacgtgggcgagctggtggggctgggcgacgtkatggacgcgctncgcctggggcccaacggcggcctgctctacttcatggagtacctggaagccaacctggactggctgcgtnccaaactcgaacccctccgc

SEQ ID NO: 13 - DNA, 267 bp, Homo sapiens
  misc feature (259): n equals a,t,g, or c
ggcagagtttagcatcaraaggttcacccagcaccttgcagattttcttaaggaattttgtctcacttttaaaaagaaggggagaagtcagctactctagttctgttgttttgtgtatataattttttaaaaaaaatttgtgtgcttctgctcattactacactggtgtgtccctctgccttttttttttttttwaaracagggtctcattctatcggccaggctggagtgcagtggtgcaatcacagctcactgcagncttgtcct

SEQ ID NO: 14 - DNA, 919 bp, Homo sapiens
ggggcgcggggggcgggggtggtggggcttctggactgagccgctgagggtgcgggctgaccctgtaagtggctgcggcgggaagatggcggagctgcgcgtgctcgtagctgtcaagagggtcatcgactacgccgtgaagatccgagtgaagcctgacaggaccggtgtggtcacggatggtgtgaagcactccatgaaccccttctgtgagatcgcggtggaggaggctgtgcggctcaaggagaagaagctggtgaaggaggtcatcgccgtcagctgtgggcctgcacagtgccaggagacgattcgtaccgccctggccatgggtgcagaccgaggtatccacgtggaggtgcccccagcagaagcagaacgcttgggtcccctgcaggtggctcgggtcctggccaagctggcagagaaggagaaggtggacctggtgctgctgggcaaacaggccatcgatgatgactgtaaccagacagggcagatgacagctggatttcttgaytggccacagggcacattcgcctcccaggtgaygctggagggggacaagttgaaagtggagcgggagatcgatgggggcctggagaccctgcgcctgaagctgccagctgtggtgacagctgacctgaggctcaacgagccccgctacgccacgctgcccaacatcatgaaagccaagaagaagaagatcgaggtgatcaagcctggggacctgggtgtggacctgacctccaagctctctgtgatcagtgtggaggacccgccccagcgcacggccggcgtcaaggtggagaccactgaggacctggtggccaagctgaaggagattgggcggatttgagcccctcccagagatggcaataaaactgactctcaacatcaaaaaaaaaaaaaaaaaaaaaaaaaa

SEQ ID NO: 15 - DNA, 2559 bp, Homo sapiens
  misc feature (2543): n equals a,t,g, or c
  misc feature (2544): n equals a,t,g, or c
ttgtcttaccaagctcttgccctgttttctggagcacaacatgaaaagggatgaagatcttcacaaggctgccaaagagatgcctttccagggctctggaaaatcagcatggtgcccagtggagatcagcaagacagtcctctggccagagagcatcagcktggtgcgatgtgtggagttgtttgaggccccggtggagtgtgaggaggaggaggaggtagaggaagaaaaagggagcttctgtgcatcgcctgagagcagcagggatgacttccaggagggaagggagggcattgtggcccggctaacagagagcctgttcctggacctgctcggagaggagaatgggggcttttgccagcaggacatgggggagtcatgccttcttccaccttcgggaagtacgagtgctcacatgccctgggatgagttcccaagtgcagggcccaaggaggcacctccctggggcaaggagcagcctctccacctggagccaagtcctcctgccagcccgacccagagtccagacaacctgacttgcacagagacgcccctcgtcatcgcaggcaaccctgcttaccgcagcttcagcaacyccctgagccagtcaccgtgtcccagagagctgggtccagacccactgctggccagacacctggaggaagtagaacccgagatgccctgtgtcccccagctctctgagccaaccactgtgccccaacctgagccagaaacctgggagcagatcctccgccgaaatgtcctccagcatggggcagctgcagcccccgtytcggcccccaccagtggctatcrggagtttgtacatgcggtggagcagggtggcacccaggccagtgcggtggtgggcttgggtcccccaggagaggctggttacaaggccttctcaagcctgcttgccagcagtgctgtgtccccagagaaatgtgggtttggggctagcagtggggaagaggggtataagcctttccaagacctcattcctggctgccctggggaccctgccccagtccctgtccccttgttcacctttggactggacagggagccacctcgcagtccgcagagctcacatctcccaagcagctccccagagcacctgggtctggagccgggggaaaaggtagaggacatgccaaagcccccacttccccaggagcaggccacagacccccttgtggacagcctgggcagtggcattgtctactcagcccttacctgccacctgtgcggccacctgaaacagtgtcatggccaggaggatggtggccagacccctgtcatggccagtccttgctgtggctgctgctgtggagacaggtcctcgccccctacaacccccctgagggccccagacccctctccaggtggggttccactggaggccagtctgtgtccggcctccctggcaccctcgggcatctcagagaagagtaaatcctcatcatccttccatcctgcccctggcaatgctcagagctcaagccagacccccaaaatcgtgaactttgtctccgtgggacccacatacatgagggtctcttaggtgcatgtcctcttgttgctgagtctgcagatgaggactagggcttatccatgcctgggaaatgccacctcctggaaggcagccaggctggcagatttccaaaagacttgaagaaccatggtatgaaggtgattggccccactgacgttggcctaacactgggctgcagagactggaccccgcccagcattgggctgggctcgccacatcccatgagagtagagggcactgggtcgccgtgccccacggcaggcccctgcaggaaaactgaggcccttgggcacctcgacttgtgaacgagttgttggctgctccctccacagcttctgcagcagactgtccctgttgtaactgcccaaggcatgttttgcccaccagatcatggcccacrtggaggcccacctgcctctgtctcactgaactagaagccgagcctagaaactaacacagccatcaagggaatgacttgggcggccttgggaaatcgatgagaaattgaacttcagggagggtggtcattgcctagaggtgctcattcatttaacagagcttccttaggttgatgctggaggcagaatcccggctgtcaaggggtgttcagttaaggggagcaacagaggacatgaaaaattgctrtgactaaagcagggacaatttgctgccaaacacccatgcccagctgtatggctgggggctcctcgtatgcatggaacccccagaataaatatgctcagccaccctgtgggccgggcaatccagacagcaggcataaggcaccagttaccctgcatgttggcccagacctcaggtgctagggaaggcgggaaccttgggttgagtaatgctcgtctgtgtgttttagtttcatcacctgttatctgtgtttgctgaggagagtggaacagaaggggtggagttttgtataaataaagtttctttgtctctttattttttatgtattaacccaaaaaaaaannaaaaaaaaaaatttc

SEQ ID NO: 16 - DNA, 1504 bp, Homo sapiens
  misc feature (665): n equals a,t,g, or c
  misc feature (1503): n equals a,t,g, or c
tgccatcgaggttctgctatttttgagaagctgaagcaactccaaggacacagttcacagaaatttggttctcagccccaaaatactgattgaattggrgacaattacaaggactctctggccaaaaacccttgaagaggccccgtgaaggaggcagtgaggagcttttgattgctgacctgtgtcgtaccaccccagaatgtgcactggrggctgtgccagatgcctgggggggaccctcattccccttgctttttttggcttcctggctaacatcctgttattttttcctggaggaaaagtgatagatgacaacgaccacctttcccaagagatctggtttttcggaggaatattaggaagcggtgtcttgatgatcttccctgcgctggtgttcttgggcctgaagaacaatgactgctgtgggtgctgcggcaacgagggctgtgggaagcgatttgcgatgttcacctccacgatatttgctgtggttggattcttgggagctggatactcgtttatcatctcagccatttcaatcaacaagggtcctaaatgcctcatggccaatagtacatggggctaccccttccacgacggggattatctcaatgatgaggccttatggaacaagtgccgagagcctctcaatgtggttccctggnaatctgaccctcttctccatcctgctggtcgtaggaggaatccagatggttctctgcgccatccaggtggtcaatggcctcctggggaccctctgtggggactgccagtgttgtggctgctgtgggggagatggacccgtttaaacctccgagatgagctgctcagactctacagcatgacgactacaatttcttttcataaaacttcttctcttcttggaattattaattcctatctgcttcctagctgataaagcttagaaaaggcagttattccttctttccaaccagctttgctcgagttagaattttgttattttcaaataaaaaatagtttggccacttaacaaatttgatttataaatctttcaaattagttcctttttagaatttaccaacaggttcaaagcatacttttcatgatttttttattacaaatgtaaaatgtataaagtcacatgtactgccatactacttctttgtatataaagatgtttatatctttggaagttttacataaatcaaaggaagaaagcacatttaaaatgagaaactaagaccaatttctgtttttaagaggaaaaagaatgattgatgtatcctaagtattgttatttgttgtctttttttgctgccttgcttgagttgcttgtgactgatcttttgaggctgtcatcatggctagggttcttttatgtatgttaaattaaaacctgaattcagaggtaacgtaacaaagattgtgtgtgttttaggaggggggacaaaacgttgaatgaataacaactcatcttttctacaaatgcttcctttgatcaaacaaaaaaaagtttttaana

SEQ ID NO: 17 - DNA, 833 bp, Homo sapiens
  misc feature (160): n equals a,t,g, or c
  misc feature (258): n equals a,t,g, or c
atgatctaccacccagccttcatcaagtatgtctttgacaactggctgcaagggcacgggcgatacccatctaccggcatcctctcagtcatcttctcaatgcatgtctgcgatgaggtggacttgtacggcttcggggcagacagcaaagggaactggncaccactactgggagaacaacccatccgcgggggcttttcgcaagacgggggtgcacgatgcagactttgagtctaacgtgacggccaccttgggctnccatcaataaaatccggatcttcaaggggagatgacgcatgaagggctgaggatggacgcactgtcacacctctgcatttccagccccagcatcttgctggagccgttccatcccggagcttggaggggcagcctcaggtgtgtgcctgggcaccgctcacagcctcttgcacccagccgttggcagcatctactcagcaaggtcactaagctctgccagcgtggcagagcatgtcttggaacctgtcttgagtggggacaacgtcccccactgctgccctagagctggggagacgctgggaaaggttcaacctccacacactaaaatcattttggctcctggggcaagcttkgggaatgaatgtggaagatgcctatattctgagagacaggacagtttcccaggaagatgggcagagacttkagtggcgattacctccagcacagagacgtgccaggcggtgttggcgctcggggcgagatgctgcccttctttgcacsaagcctggcctcttgcttggcgtgataaccctgtcatcttcccaaagctcatttatgagccaccagaggctcct

SEQ ID NO: 18 - DNA, 643 bp, Homo sapiens
  misc feature (103): n equals a,t,g, or c
  misc feature (572): n equals a,t,g, or c
  misc feature (613): n equals a,t,g, or c
  misc feature (643): n equals a,t,g, or c
gccttggtctcctgcattctgacccaggcatctgcagtgcacgagggtttatggcaaaccccattgaagccagttccgtatgggctggacctggactgcggantccctggcaccccagaggctcatgtctgttttgaacccctgtcagaattacaccctcctggatgaacccttccgaagcacagagaactcagcagggtcccaggggtgcgataaaaacatgagcggctggtaccgctttgtaggggaaggaggagtaaggatgtcggagacctgtgtccaggtgcaccgatgccagacagacgctcccatgtggctgaatgggacccaccctgcccttggggatggcatcaccaaccacactgcctgtgcccattggagtggcaactgctgtttctggaaaacagaggtgctggtgaaggcctgcccaggcgggtaccatgtgtaccggttggaaggcactccctggtgtaatctgagatactgcacagacccatccactgtggaggacaagtgtgagaaggcctgccgccccgaggaggagtgccttgccctcaacagcaactggggtnttttctgcagacaaggacctcaatagttctgatgtccacanttttgcagcctcagttagactttggggccn

SEQ ID NO: 19 - DNA, 340 bp, Homo sapiens
  misc feature (262): n equals a,t,g, or c
  misc feature (333): n equals a,t,g, or c
aattcggcacgagggaaaaattrcacaaacaatctcagcctgggtaaatgagagatgccctgttagcttattctccccagtttaccctttctccccaggtgatcaagtatggattaaagactgggaatgtagcttctttgtgcccatggtggataggaccccagattgtsatcctgaccactctcaccgctgtgaaggtagaaggaatcccagcctggatccaccacagccatgtaaaacctgcagcgcctgaaacctgggnggcaagaccaagcccggacaacccttgcagagtgaccttgaagatgatgacaagccctgttccagtcacanccagaag

SEQ ID NO: 20 - DNA, 673 bp, Homo sapiens
  misc feature (3): n equals a,t,g, or c
  misc feature (4): n equals a,t,g, or c
ggnnctttccctttcccggggcctggggcgcaatcaggtggagtcgagaggccggaggaggggcaggaggaaggggtgcggtcgcgatccggacccggagccagcgcggagcacctgcgcccgcggctgacaccttcgctcgcagtttgttcgcagtttactcgcacaccagtttcccccaccgcgctttggattagtgtgatctcagctcaaggcaaaggtgggatatcatggcatctatctgggttggacaccgaggaacagtaagagattatccagactttagcccatcagtggatgctgaagctattcagaaagcaatcagaggaattggaactgatgagaaaatgctcatcagcattctgactgagaggtcaaatgcacagcggcagstgattgttaaggaatatcaagcagcatatggaaaggagctgaaagatgacttgaagggtgatctctctggccactttgagcatctcatggtggccctagtgactccaccagcagtctttgatgcaaagcagctaaagaaatccatgaagggcgcgggaacaaacgaagatgccttgattgaaatcttaactaccaggacaagcaggcaaatgaaggatatctctcaagcctatttatacagtatacaagaagagtcttgggagatggacattagtttccg

SEQ ID NO: 21 - DNA, 415 bp, Homo sapiens
aattcggcacgagctgaattatgtttaaatttattgtaggatgctgatcttctggacaatcacacttttcctgctgggagcagccaaaggaaaagaagtttgctatgaggacctcgggtgcttttttgacactgagccctggggcgggacagcaatcaggcccctgaaaattctcccctggagccctgagaagatcggcacccgcttcctgctgtacaccaatgaaaacccaaacaactttcaaattctcctcctctctgatccatcaacaattgaggcatcaaattttcaaatggacagaaagacccggttcatcatccatgggtttcatagacaaaggggatgagagcttgggtgacagacatgtgcaagaaactttttcggggttggaggaggtgaactgcatttgcgttgg

SEQ ID NO: 22 - DNA, 633 bp, Homo sapiens
aattcggcagagatttcaaatggacagaaagacccggttcatcatccatsgcttcatagacaaaggagatgagagctgggtgacagacatgtgcaagaaactgttcgaggtggaggaggtgaactgcatctgcgtggactggaagaagggctcccaagccacctacacacaggctgccaacaacgtgcgagtggtgggcgcccaggtggcccagatgctcgacatcctcttgacagagtatagctaccccccttccaaagttcacctcattggccacagcctgggagcccacgtggctggagaggcaggaagcaagactccaggcctgagcaggattacagggttggatcctgtagaagcaagtttcgagagtactcctgaagaggtgcgacttgatccctctgaatgctgacttttttgatgtgattcacacggatgcagctcccctgatcccattcttgggttttggaacgaaccaacagatgggtcatcttgacttcttccccaatggaggagagagcatgccgggatgcaagaagaatgccctgtctcagatcgtggatctagatggcatctgggcgggaacccgggactttttggcttgcaattcacctaagaagctacaagttatta

SEQ ID NO: 23 - DNA, 2423 bp, Homo sapiens
  misc feature (2): n equals a,t,g, or c
  misc feature (4): n equals a,t,g, or c
  misc feature (12): n equals a,t,g, or c
  misc feature (18): n equals a,t,g, or c
  misc feature (54): n equals a,t,g, or c
  misc feature (2409): n equals a,t,g, or c
  misc feature (2422): n equals a,t,g, or c
cngncagtgacngtgccngattcccgggtcgacccacgcgtccggaacagctgnaaaccttttggagggagaaggaggaggagcttgaagtcagctttgagcctcccaagtggaaggctcccagggtgctgagcttctctctgaaatccaaagtcctcaacgaaatgtcagctttgatgtgcttcctgcctttaatgcactgggtcagctgagttctggctccacacccagccccgaggtttatgcagggctcattgatctgtataaatcctcggacctcccgggaggagagttttctacctgtttcacagtcctgcagcgaaacttcattcgctcccggcccaccaaactaaaggatttaattcgcctggtgaagcactggtacaaagagtgtgaaaggaaactgaagccaaaggggtctttgcccccaaagtatgccttggagctgctcaccatctatgcctgggagcakgggagtggagtgccggattttgacactgcagaaggtttccggacagtcctggagctggtcacacaatatcagcagctctgcatcttctggaargtcaattacaactttgaagatgagaccgtgagaaagtttctactgagccagttgcagaaaaccaggcctgtggatcttggacccagccgaacccacaggtgacgtgggtggaggggaccgttggtgttggcatcttctggcaaaagaagyaaaggaatggttatcctctccctgcttcaaggatgggactggaaacccaataccaccttggaaagtgccggtaaaagtcatctaaaggaggcgttgtctggaaatagccctgtaacaggsttgaatcaaagaacttctcctactgtagcaacctgaaattaactcagacacaaataaaggaaacccagctcacaggagcttaaacagctggtcagccccctaagcccccactacaagtgatcctcaggcaggtaaccccagattcatgcactgtagggtgctgcgcaatccctagtctctacccagtagatgccactagccctcctctcccagtgacaaccaaaagtcttcagacattgtcaaacgttcccctgggttcacagatctttctgcctttggcttttggctccaccctctttagctgttaatttgagtacttatggccctgaaagcggccacggtgcctccagatggcaggtttgcaatccaagcaggaagaaggaaaagatacccaaaggtcaagaacacagtgattttattagaagtttcatccgcaaattttcttccatttcattgctcagaaatgtcatgtggytacctgtaacttgaaggtggctacaaagatgactgtggacgtgggttgcactggccacccaaggatgtctgccacacctctccaaagccctccctacctaccaagatatacctgatatattccaccaggatatcctccctccagatatacttggttctctccaccaggttctttctttaaagcaggatttctcaactttgatacttactcacatttggggctagacagttctttgtttggaggctctcttgtgcattgtaggatgttgagcagcatctctggcctgtacccagtagatgccacccagttgtsmcaattaaaagtgtcttgagactttatcagtgtcttctgccctaggtgagaacccttgcactagaggaaccctacaccccaaccctggggggaatgtagggaagaggtggccaagccaaccgtggggttagctctaattattaagatatgcattataaataaataccaaaaaattgtctctggcaatagttaccttcccagatacaggtccccccttttttcccctaactcttttaagcaatgattgtaactattaggagacattgctctcccacgtatgtttttctttttagacaatgcagacaccaggaagttgtggagctaggatccatcctattgtcaatgagatgttctcatccagaagccatagaatcctgaataataattctaaaagaaacttctrgagatcatctggcaatcgcttttaaagactcggctcaccgtgagaaagagtcactcacatccattcttcccttgatggtccctattcctccttcccttgcttcttggacttcttgaaatcaatcaagactgcaaaccctttcataaagtcttgccttgctgaactccctctctgcaggcagcctgcctttaaaaatagttgctgtcatccactttatgtgcatcttatttctgtcaacttgtattttttttcttgtatttttccaattagctcctcctttttccttccagtctaaaaaaggaatcctctgtgtcttcaaagcaaagctctttactttccccttggttctcataactctgtgatmttgctctcggggcttcmaantcakccaagtccng

SEQ ID NO: 24 - DNA, 384 bp, Homo sapiens
  misc feature (357): n equals a,t,g, or c
ggaagctccaggcaaacagcccagcaaacagcagcactcagctaaaaggaagactcacagaacacagttgaagaaggaaagtggcgatggacctcatcccaaatttggcggtggaaacctggcttctcctggctgtcagcctggtgctcctctatctatatgggacccgtacacatggactttttaagagactgggaattccagggcccacacctctgcctttgttgggaaatgttttgtcctatcgtcagggtctctggaaatttgacacagagtgctataaaaagtatggaaaaatgtgggggtgagtattctgaaaacctccattggatagacctgctactgtgaggaggttancccatgcagagatctctggccagtttg

SEQ ID NO: 25 - DNA, 900 bp, Homo sapiens
  misc feature (11): n equals a,t,g, or c
  misc feature (880): n equals a,t,g, or c
cctgcagaccncaggtctgcggcaggatgggagccgccagatcgccatcgcggccatggtggccaacttcaccaagcccacagccgacgcgccctcgctgctgcagcatgacgaggtggagacctacttccatgagtttggccacgtgatgcaccagctctgctcccaggcggagttcgccatgttcagcgggacccacgtggagcgggactttgtggaggcgccgtcgcagatgctggagaactgggtgtgggagcaggagccgctgctgcggatgttcgcggcactaccgcacaggcagcgccgtgccccgggagctcctggagaagctcattgagtcccggcaggccaacacaggcctcttcaacctgcgccagatcgtcctcgccaaggtggaccaggccctgcacacgcaracggacgcagaccccgccgaggagtatgcgcggctctgccaggagatcctcggggtcccggccacgccaggaaccaacatgcctgcaaccttcggccatctggcaggtggctacgacgcccagtactacgggtacctgtggagcgaggtgtattccatggacatgttccacacgcgcttcaagcaggagggtgtcctgaacagcaaggttggcatggattacagaagctgcatcctgagacccggcggttccgaggatgccagcgccatgctgaggcgcttcctgggccgtgaccccaagcaggacgccttcctcctgagcaaggggctgcaggtcgggggctgcgagcccgagccgcagtctggytgaggcctggcattgcgactgcccaktytgggcytgcgctcccgccgccctggtgctttagcccccggcacaggatggggcaggytytggcamatgcntgggattggcaggtggctga

SEQ ID NO: 26 - DNA, 1322 bp, Homo sapiens
  misc feature (363): n equals a,t,g, or c
  misc feature (366): n equals a,t,g, or c
  misc feature (1321): n equals a,t,g, or c
ggaagtgagaagccgggtggggcaggctggaaggaagacgaacctacgaagcagagatctgaagacagcatgtacacagccattccccagagtggctctccattcccaggctcagtgcaggatccaggcctgcatgtgtggcgggtggagaagctgaagccggtgcctgtggcgcaagagaaccagggcgtcttcttctcgggggactcctacctagtgctgcacaatggcccagaagaggtttcccatctgcacctgtggataggccagcagtcatcccgggatgagcagggggcctgtgccgtgctggctgtgcacctcaacacgctgctgggagagcggcctgtgcagcaccgcgaggtnagnggcaatgagtctgacctcttcatgagctacttcccacggggcctcaagtaccaggaaggtggtgtggagtcagcatttcacaagacctccacaggagccccagctgccatcaagaaactctaccaggtgaaggggaagaagaacatccgtgccaccgagcgggcactgaactgggacagcttcaacactggggactgcttcatcctggacctgggccagaacatcttcgcctggtgtggtggaaagtccaacatcctggaacgcaacaaggcgagggacctggccctggccatccgggacagtgagcgacagggcaaggcccaggtggagattgtcactgatggggaggagcctgctgagatgatccaggtcctgggccccaagcctgctctgaaggagggcaaccctgaggaagacctcacagctgacaaggcaaatgcccaggccgcagctctgtataaggtctctgatgccactggacagatgaacctgaccaaggtggctgactccagcccmtttgcccttgaactgctgatatctgatgactgctttgtgctggacaacgggctctgtggcaagatctatatctggaaggggcgaaaagcgaatgagaaggagcggcaggcagccctgcaggtggccgagggcttcatctcgcgcatgcagtacgccccgaacactcaggtggagattctgcctcagggccgtgagagtcccatcttcaagcaatttttcaaggactggaaatgagggtgggcgtcttcctgccccatgctcccctgccccccaccacctgcctgcttgcttctctggctgcctggtcagtgcagaggtgccccctgcagatgttcaataaaggagacaagtgctttcccagctcttttcctgcaaaaaaaaaaaaaaaaaaaaaaaaaaaaaaaaaaaaaaaaaaaaaaaaaaaaaaaaaaaaaaaaang

SEQ ID NO: 27 - DNA, 457 bp, Homo sapiens
  misc feature (432): n equals a,t,g, or c
  misc feature (435): n equals a,t,g, or c
  misc feature (454): n equals a,t,g, or c
  misc feature (457): n equals a,t,g, or c
aacctcattgcctgctcataaagtatkagcaggcaatgaggtttccaaaatctcatctaaatactctccaatctattagcaaaaatcagagtaaaatacagaggaaaggcactgctttctgttaattgatttaacatgcatgaattagctccctctgagttccaggcactatgctgagagtacaaagaagacacaagtctgctttcaagcaactcactgtgaaagtgtttttgaagggaggaacagaaatgagacccctatctttccctataaaaacaacatttttactgtcttttgcctgccaatctgtatttgaaaccattggacactgattctctggsctgggactttggcattgatgggtttctgcctttcttctcagcctctgcctctattgcatttattaaactgcattgtgtgcaaaaaaaaaanaanaaaaaaaaaaagggggggnccn

SEQ ID NO: 28 - DNA, 596 bp, Homo sapiens
  misc feature (538): n equals a,t,g, or c
  misc feature (583): n equals a,t,g, or c
  misc feature (593): n equals a,t,g, or c
cgcggcggcctcctcggtgcgcgacccccggctcagaggactctttgctgtcccgcaagatgcggatgctgctggcgctcctggccctctccgcggcgcgccatcggcagtgcagagtcacactggtgctacgaggttcaagccgagtcctccaactacccctgcttggtgccagtcaagtggggtggaaactgccagaaggaccgccagtcccccatcaacatcgtcaccaccaaggcaaaggtggacaaaaaactgggacgcttcttcttctctggctacgataagaagcaaacgtggactgtccaaaataacgggcactcagtgatgatgttgctggagaacaaggccagcatttctggaggaggactgcctgccccataccaggccaaacagttgcacctgcactggtccgacttgccatataagggctcggagcacagcctcgatkgggaagcatttgccatgggagatgcacatagttacatgagaaagagaaggggacatccgaggaatgtgaaagaggcccaggaccctnaaagacgaatttgcggtgctgggctttttttgggtggaggttggnaacccggttnaac

SEQ ID NO: 29 - DNA, 436 bp, Homo sapiens
  misc feature (64): n equals a,t,g, or c
  misc feature (372): n equals a,t,g, or c
  misc feature (410): n equals a,t,g, or c
ccaaagaggggttgmtctctcttcacctrctctgttctacagcacactaccagaagacagcagnaatgaaaagcatttactttgtggctggattatttgtaatgctggtacaaggcagctggcaacgttcccttcaagacacagaggagaaatccagatcattctcagcttcccaggcagacccactcagtgatcctratcagatgamcgaggacaagcgccattcacagggcacattcaccagtgactacagcaagtatctggactccaggcgtgcccaagattttgtgcagtggttgatgaataccaagaggaacaggaataacattgccaaacgtcacggtgaattttgagagacatgctggaaggggnccttttaccagtggtgtaagtttcttatttgggaaggncaagctgcccaagggattcattgctt

SEQ ID NO: 30 - DNA, 1314 bp, Homo sapiens
  misc feature (572): n equals a,t,g, or c
  misc feature (1177): n equals a,t,g, or c
  misc feature (1284): n equals a,t,g, or c
  misc feature (1295): n equals a,t,g, or c
  misc feature (1306): n equals a,t,g, or c
gctgggggctggtggggagcaggggaagggaatgtgaccaggtctaggtctggagtttcagcttggacactgagccaagcagacaagcaaagcaagccaggacacaccatcctgccccaggcccagcttctctcctgccttccaacgccatggggagcaatctcagcccccaactctgcctgatgccctttatcttgggcctcttgtctggaggtgtgaccaccactccatggtctttggcccggccccagggatcctgctctctggagggggtagagatcaaaggcggctccttccgacttctccaagagggccaggcactggagtacgtgtgtccttctggcttctacccgtaccctgtgcagacacgtacctgcagatctacggggtcctggagcaccctgaagactcaagaccaaaagactgtcaggaaggcagagtgcagagcaatccactgtccaagaccacacgacttcgagaacggggaatactggccccggtctccctactacaatgtgagtgatgagatctctttccactgctatgacggttacactctccggggctctgcnaatcgcacctgccaagtgaatggccggtggagtgggcagacagcgatctgtgacaacggagcggggtactgctccaacccgggcatccccattggcacaaggaaggtgggcagccagtaccgccttgaagacagcgtcacctaccactgcagccgggggcttaccctgcgtggctcccagcggcgaacgtgtcaggaaggtggctcttggagcgggacggagccttcctgccaagactccttcatgtacgacacccctcaagaggtggccgaagctttcctgtcttccctgacagagaccatagaaggagtcgatgctgaggatgggcacggcccaggggaacaacagaagcggaagatcgtcctggacccttcaggctccatgaacatctacctggtgctagatggatcagacagcattggggccagcaacttcacaggagccaaaaagtgtctagtcaacttaattgagaaggtggcaagttatggtgtgaagccaagatatggtctagtgacatatgccacataccccaaaatttgggtcaaagtgtctgaagcagacagcagtaatgcaggactgggtcacggaagcagcttcaatgraantcaattwttgaagaccacaagtttgaagtcaggggcttaacaccaaggaagggccctccagggagttgttacagcattgatgaggttgggccagatggacgttcccntccttgaaggnttgggaaccgncacccgcc

SEQ ID NO: 31 - DNA, 1467 bp, Homo sapiens
aagagattcccccctcactatgcattggttccttgcaggtaaacgatcgacgcattctagatgggatgtttgctatctgtggtgtttctgacagcaagttccgtaccatctgctcctcagtagacaagctggacaaggtgtcctgggaagaggtgaagaatgagatggtgggagagaagggccttgcacctgaggtggctgaccgcattggggactatgtccagcaacatggtggggtatccctggtggaacagctgctccaggatcctaaactatcccaaaacaagcaggccttggagggcctgggagacctgaagttgctctttgagtacctgacctatttggcattgatgacaaatctcctttgacctgagccttgctcgaagggctggattactacactggggtgatctatgaggcagtgctgctacagaccccagcccaggcaggggaagagcccctgggtgtgggcagtgtggctgctggaggacgctatgatgggctagtgggcatgttcgaccccaaagggcgcaaggtgccatgtgtggggctcagcattggggtggagcggattttctccatcgtggaacagagactagaggctttggaggagaagatacggaccacggagacacaggtgcttgtggcatctgcacagaagaagctgctagaggaaagactaaagcttgtctcagaactgtgggatgctgggatcaaggctgagctgctgtacaagaagaacccaaagctactgaaccagttacagtactgtgaggaggcaggcatcccactggtggctatcatcggcgagcaggaactcaaggatggggtcatcaagctccgttcagtgacgagcagggaagaggtggatgtccgaagagaagaccttgtggaggaaatcaaaaggagaacaggccagcccctctgcatctgctgaactgaacaaactatcagaggaaaggaagtgggactggcactatttgaggttaagacaaactgcatatgtacttcaattgctttgcacttttccgtttcagcggaagacctgaagagtggtcagaacagagcctttgatttttattatggttattttattgattattactggcaaaaacggccaggtacaacacctttttcatacaaggcccaggaggcttagtccagtctgtgctcctgggctacaaggacccagcctgagatggtcccatctgcagggccccgcaccagttggagcagatgcctccccaccaccaattgccaaaggtccaataaaatgcctcaaccacggagtctgcgtgtgtcagtgatgcctagccccgccttccccagcagaccaatgtagggatggaaaagggagaaaaacagtaaacttgtgaccctgaggttcttgtctccagcgttccacctgcggcttgggagcttctcctcgggaggcagcccccgtacattacgcaccccgcgaacttt

SEQ ID NO: 32 - DNA, 2346 bp, Homo sapiens
  misc feature (2346): n equals a,t,g, or c
gcagtacaagcggcactgcatcaactgcctgcacgtcgtcaccctgtacaatcgaatcaagagagacccggccaaggcttttgtgcccaggactgttatgattgggggcaaggcagcgcccggttaccacatggccaagctgatcatcaagttggtcacctccatcggcgacgtcgtcaatcatgacccagttgtgggtgacaggttgaaagtgatcttcctggagaactaccgtgtgtccttggctgagaaagtgatcccggccgctgatctgtcgcagcagatctccactgcaggcaccgaggcctcaggcacaggcaacatgaagttcatgctcaacggggccctcaccatcggcaccatggacggcgccaacgtggagatggccgaggaggcsggggccgagaacctcttcatcttcggcctgcgggtggaggatgtcgaggccttggaccggaaagggtacaatgccagggagtactacgaccacctgcccgagctgaagcaggccgtggaccagatcagcagtggctttttttctcccaaggagccagactgcttcaaggacatcgtgaacatgctgatgcaccatgacaggttcaaggtgtttgcagactatgaagcctacatgcagtgccaggcacaggtggaccagctgtaccggaaccccaaggagtggaccaagaaggtcatcaggaacatcgcctgctcgggcaagttctccagtgaccggaccatcacggagtatgcacgggagatctggggtgtggagccctccgacctgcagatcccgccccccaacatcccccgggactaggcacaccctgccttggcgggaccagcgggcatttgttttcttgctgactttgcacctccttttttccccaaacactttgccagccgctggtggtccctgcttttctgagtaccatgtttccaggaggggccatgggggtcagggtggttttgagagagcagggtaaggaaggaatgtgctagaagtgctcctagtttcttgtaaaggaagccagagttgacagtacaaagggtcgtggccagccctgcagcttcagcacctgccccacccagagtgggagtcaggtggagccacctgctgggctcccccagaactttgcacacatcttgctatgtattagccgatgtctttagtgttgagcctctggattctggggtctgggccagtggccatagtgaagcctgggaatgagtgttactgcagcatctgggctgccagccacagggaagggccaagccccatgtagccccagtcatcctgcccagccctgcctcctggccatgccgggaggggtcggatcctctaggcatcgccttcacagccccctgccccctgccctctgtcctggctctgcacctggtatatgggtcatggacccagatggggctttccctttgtagccatccaatgggcattgtgtgggtgcttggaacccgggatgactgagggggacactggagtgggtgcttgtgtctgctgtctcagaggccttggtcaggatgaagttggctgacacagcttagcttggttttgcttattcaaaagagaaaataactacacatggaaatgaaactagctgaagccttttcttgttttagcaactgaaaattgtacttggtcacttttgtgcttgaggaggcccattttctgcctggcagggggcaggtctgtgccctcccgctgactcctgctgtgtcctgaggtgcatttcctgttgtacacacaagggccaggctccattctccctccctttccaccagtgccacagcctcgtctggaaaaaggaccaggggtccsggaggaacccatttgtgctctgcttggacagcaggcctggcactgggaggtgggggtgagcccytcacagccttgcccctccccarggctggcaacctgcctyccattgcccaagagagagggcagggaacaggctactgtccttccctgtggaattgccgagaaatctagcaccttgcatgctggatctgggctgcggggaggctctttttctccctggcctccagtgcccaccaggaggatctgcgcacggtgcacagcccaccagagcactacagccttttattgagtggggtggggcaagtgctgggctgtggtcgtgccctgacagcatcttccccaggcagcggctctgtggaggaggccatactcccctagttggccactggggccaccaccctgaccaccactgtgcccctcattgttactaccttgtgagataaaaactgattaaacctttgtggctgtggttggctgaaaaaaaaaaaaaaaaaaaaaaaaaaagggggggn

SEQ ID NO: 33 - DNA, 459 bp, Homo sapiens
  misc feature (388): n equals a,t,g, or c
  misc feature (394): n equals a,t,g, or c
  misc feature (428): n equals a,t,g, or c
tcgacccacgcgtccgagagacagtcacaccagctgcccctagtggggctcttactgttttcttttattccaagccaactatgcgagatttgtgaggtaagtgaagaaaactacatccgcctaaaacctctgttgaatacaatgatccagtcaaactataacaggggaaccagcgctgtcaatgttgtgttgtccctcaaacttgttggaatccagatccaaaccctgatgcaaaagatgatccaacaaatcaaatacaatgtgaaaagcagattgtcagatgtaagctcgggagagyttgccttgattatactggctttgggagtatgtcgtaacgctgaggaaaacttaatatatgattaccacctgatcgacaagytagraaatnaaattnccargcagaaattggaaaatwtgggaggcacacnatgggcactcccctgacttactacttcccag

SEQ ID NO: 34 - DNA, 629 bp, Homo sapiens
  misc feature (607): n equals a,t,g, or c
  misc feature (613): n equals a,t,g, or c
  misc feature (617): n equals a,t,g, or c
  misc feature (621): n equals a,t,g, or c
gttggactttaatcttaccgatccagaaaatgggcctgttcttgatgattctctaccaaactcagtacatgaatatattccctttgccaaagattgtggaaataaggaaaaatgtatctcagacctcagcctgcatgtcgccaccactgaaaaggacctgctgattgtccgatcccagaatgataagttcaacgttagcctcacagtcaaaaatacaaaggacagtgcctataacaccaggacaatagtgcattattctccaaatctagttttttcaggaattgaggctatccaaaaagacagttgtgaatctaatcataatatcacatgtaaagttggatatcccttcctgagaagaggagagatggtaactttcaaaatattgtttcagtttaacacatcctatctcatgggaaaatgtgaccatttatttaagtgcacaagtggacagcgarggaacctcctgaaaccctttytgataatgtagtaaacatttsytwtcccgggtaaaatwtggaagttgggctacagttttacagytctgcaagtggrwtaccacatttcaatggccggccatggagacagtccccggaagtttattaattcnaccggnggancatngggaaagg

SEQ ID NO: 35 - DNA, 918 bp, Homo sapiens
  misc feature (918): n equals a,t,g, or c
atggcagcgccgtggctgccaccagcaccatcaacacaccctttggagcgatggtgtattcaccacggacaggcatcatcctcaacaacgagctcctggacttatgcgagcgatgcccccggggttccggcaccaccccctcacctgtgagtggagacagggtgggtggagctcccggaagtgctggcccccagttccaggcgagcgttccccatcctccatggtgccctccatcttgatcaacaaagcccaggggtcgaagctagtgattggcggggctggcggggagctcatcatctctgctgtggcccaggcatcatgagcaagctgtggcttggctttgacctgagagcggccattgcagcccccatcctgcatgtcaacagcaagggctgtgtggagtacgagcccaacttcagccaggaggtgcagaggggactccaagaccgtggccagaaccagacccagaggcccttcttcctgaacgtggtccaggctgtgtcccaggagggggcctgtgtgtacgccgtctcggacctgaggaagagtggggaggccgcaggctactaagacactgctctgcccagagctgaagtctggccccaccatgagtcctgtgtccaggccggacatggctgggggaccaactactctggcaggatctggacccctggcaggggagtccagctgagagtggaagaggtggcggggaccagctgggcagatgagagctgagcctcatccctaaccccctttcccagagcccctggtggtcctgaaccggcccctctatccctccgcaggcctcttgcctggggccactctcccaccctctcgatctgtatatcctccagtccaagattaaagaggcggactgtgaaaaaaaaaaaaaaaaaaaaaaaaaaaaaaaaaaaaaan

SEQ ID NO: 36 - DNA, 802 bp, Homo sapiens
  misc feature (659): n equals a,t,g, or c
  misc feature (677): n equals a,t,g, or c
  misc feature (684): n equals a,t,g, or c
  misc feature (736): n equals a,t,g, or c
  misc feature (763): n equals a,t,g, or c
tgcctcccacagtcggggtagcagctcctcctcacacagctcatctgtcaggcggggcagctcctacagctcttccatgagcacaggaggaggtggtgcaggctccctgggtgcaggcggtgcctttggtgaagctgcaggagacaggggtccctatggcactgacatcggcccaggcggaggctatggggcagcagcagaaggcggcatgtatgctggcaatggcggactattgggagctgactttgctggagatctggattacaatgagctggctgtgagggtgtcagagagcatgcagcgtcagggcctactgcaagggatggcctacactgtccagggcccaccaggccagcctgggccacaggggccacccggcatcagcaaggtcttctctgcctacagcaacgtgactkcggacctcatggacttcttccaaacttatggagccattcaaggaccccctgggcaaaaaggagagatgggcactccaggacccaaaggtgacaggggccctgctgggccaccaggtcatcctgggccacctggcccttcgaggacacaagggagaaaaaggagacaaaggttgaccaagtctatgctgggcggagaaggagaagaagttattggctgtcaaccgttgagctagccatgggcangacagctcctgggaccangtcttcntaatgctgtggcattaggtccaagtctccagaggtgaaagtggatctgtcangtcttactgagacagcacagccaactnagtagcaacatttgttttagtctggaacatatatacttt

SEQ ID NO: 37 - DNA, 2093 bp, Homo sapiens
gtcctccaggaatccctggccagcctgggctaaagggtctaccaggaccccaaggacctcaaggcttaccaggtccaactggccctccaggagatcctggacgcaatggactccctggctttgatggtgcaggagggcgcaaaggagacccaggtctgccaggacagccaggtacccgtggtttggatggtccccctggtccagatggattgcaaggtcccccaggtccccctggaacctcctctgttgcacatggatttcttattacacgccacagccagacaacggatgcaccacaatgcccacagggaacacttcaggtctatgaaggcttttctctcctgtatgtacaaggaaataaaagagcccacggtcaagacttggggacggctggcagctgccttcgtcgctttagtaccatgcctttcatgttctgcaacatcaataatgtttgcaactttgcttcaagaaatgactattcttactggctctctaccccagagcccatgccaatgagcatgcaacccctaaagggccagagcatccagccattcattagtcgatgtgcagtatgtgaagctccagctgtggtgatcgcagttcacagtcagacgatccagattccccattgtcctcagggatgggattctctgtggattggttattccttcatgatgcatacaagtgcaggggcagaaggctcaggtcaagccctagcctcccctggttcctgcttggaagrgtttcgttcagctcccttcatcgaatgtcatgggaggggtacctgtaactactatgccaactcctacagcttttggctggcaactgtagatgtgtcagacatgttcagtaaacctcagtcagaaacgctgaaagcaggagacttgaggacacgaattagccgatgtcaagtgtgcatgaagaggacataacattttgaagaattccttttgtgttttaaaatgtgatatatatatatataaaattcctaggatgcagtgtctcattgtccccaactttactactgctgccgtcaatggtgctactatatatgatcaagataacatgctgactagtaaccatgaagattcagatgtacctcagcaatgcgccagagcaaagtctctattatttttctactaaagaaataaggaagtgaatttactttttgggtccagaatgactttctccaagaattataagatgaaaattatatattttgcccagttactaaaatggtacattaaaaattcaattaagagargagtcacattgagtaaaataaaagactgcagtttgtgggaagaattatttttcacggtgctactaatcctgctgtatcccgggtttttaatataaaggtgttaagcttattttgctttgtaagtaaagaatgtgtatattgtgaacagccttttagctcaaaatgttgagtcatttacatatgacatagcatgaatcactctttacagaaaatgtaggaaaccctagaatacagacagcaatattttatattcatgtttatcaaagtgagaggacttatattcctacatcaagttactactgagagtaaatttattttgagttttatcccgtaagttctgttttgattttttttaaaaaacaaacccttttagtcactttaatcagaattttaaatgttcatgttacataccaaattataatatctaatggagcaatttgtcttttgctatattctccaagattatctcttaagaccatatgccccctgttttaatgtttcttacatcttgtttttactcatttctgactggacaaagttcttccaaacaattctgagaaacaaaaacacacacgcagaattaacaattcttttccctgtgcttcttatgtaagaatcctcctgtggcctctgcttgtacagaactgggaaacaacacttggttagtctcttttaagttacaaaaagccaattgatgtttcttattctttttaaattttaaatattttgttataaatactcacaggataccttatttccctagctatcatctcctgacttaatgttttttaaacccaccaatataaatttaattaaagatatatgttgt

SEQ ID NO: 38 - DNA, 434 bp, Homo sapiens
  misc feature (325): n equals a,t,g, or c
  misc feature (403): n equals a,t,g, or c
gggcttatagataaatacttgctttttttctataacctgtagacttatttcctttgattataatgctattgacactttgataactgtttctctaaaaccttacaagaaaaactaagcttctctaaacttgtattcattatgggagaatgccattcttatgtctggttatatctgcattaggttattgatgatgctagtaacaatgaactttatgttactgcagctcacaaatgcttttttacatctgcaagaaattaactagtcatcaaatgcttagtagcacagaaattctcaagtggttgcggggaaatattgatcygcaggnrtaaattcttccttaaaaataagggtargcaaatggcmtwtttaaaaaatgggrggatwtttgggatggtaatggtgnggggttactaaagggtttttagccccatagg

SEQ ID NO: 39 - DNA, 1078 bp, Homo sapiens
  misc feature (36): n equals a,t,g, or c
  misc feature (877): n equals a,t,g, or c
aggaagtaattgagagtgctggcaacaaggctgaantatagagaagttgtaggattaactttttcgcccaaagcagcttcacccacgttttattcccatcgagggagkgagaatgggtgccgctgagtgggcgggggagtggtccctgaaagaggtggagtgctacagcccctccccgttggctctcgctgtttgtccgttgttggtttatactaatttgacaacagccgcctgttgagtctcctccagatcgcagctgaaggatctgttgagcgcttcaggaaaggcggtgagatccsgtaccgcagcagagcactctcagctctgggtcttgcaggcgcagggctcccccatgccagcagaaagatttcctctggtgaagaggaccgtcgaatctgtcctcctcaagacacctcttgtacagaatttattcgaatgccacggccaaggtcttccttgaaaaatgttaaccgatgtgtgctttttgtcttttgtcatcctttctttaggacaggcgacactaacaggtgaagatctcgggagaccatgactaagaaaagaattgctgtgattgggggaggagtgagcgggctctcttccatcaagtgctgcgtagaagaaggcttgggaacctgtctgctttgaaaggactgatgacatcggaagggctctggaggttccaggaaaatcctgaagaaggaagggccagtatttacaaatcagtgatcatcaatacttctaaagagatgatgtgcttcaktgactatccaatcccagatcattatcccaacttcatgcataatgccccaggtccctggrgtatttcaggatgtatgccaaagaatttgaccttctaaagtatattcgatttaagacnactgtgtgcagtgtgaagaagcagcctgattttgccacttcaggccaatgggaagtggtcactgaatctgaagggaaaaaggagatgaatgtctttgatggagtcatggtttgcactggccatcacaccaatgctcatctacctctggaaagcttccctggtgagcagcttaccaggaaggaagacccttgactccacgcc

SEQ ID NO: 40 - DNA, 1976 bp, Homo sapiens
  misc feature (1058): n equals a,t,g, or c
  misc feature (1919): n equals a,t,g, or c
  misc feature (1934): n equals a,t,g, or c
  misc feature (1957): n equals a,t,g, or c
ggcgtaagaccggagggacgcggcggtagcggcggccgttgcgattgattgcgctggttgcctgcggcgtccacttccttggccgcccttgctacactggctgattgttgtgcagccggcgccatgtctgtgagcgagatcttcgtggagctgcagggctttttggctgccgagcaggacatccgagaggaaatcagaaaagttgtacagagtttagaacaaacagctcgagagattttaactctactgcaaggggtccatcagggtgctgggtttcaggacattccaaagaggtgtttgaaagctcgagaacattttggtacagtaaaaacacatctaacatctttgaagaccaaatttcctgctgaacagtattacagatttcatgagcactggaggtttgtgttgcagcgcttggtcttcttggcagcatttgttgtgtatttggaaacagaaacactagtgactcgagaagcagttacagaaattcttggcattgagccagatcgggagaaaggatttcatctggatgtagaagattatctctcaggagttctaattcttgccagtgaactgtcgaggctgtctgtcaacagcgtgactgctggagactactcccgacccctccacatctccaccttcatcaatgagctggattccggttttcgccttctcaacctgaaaaatgactccctgaggaagcgctacgacggattgaaatatgacgtgaagaaagtagaggaagtggtctatgatctctccatccggggctttaataaggagacggcagcagcttgtgttgaaaaataggaggctctccttgctcctggccttgctgacctcagcggttgccaggaaggggtgmrcacagagtgcctcttacggtagttaggatgctcagttgctaaacactgcgctttattttcttaaccagttgtggtgtgagtatcagaattgaaacacttttttgggggtaaaaaatatagcctttacatggacagaattttttttgttgtttcagtgaatatgcctgtaattcagtgtatttcagttccgtncagaaagtgtaaatgttagtttcttggtaaagtccttttcttgcttaccttgactgttgatgtactgattgagaagttcattgtctcgtttgtgattcttccagatgtgatgcttgatattttctatatgcgagttagccatccacacccaggcatagctgatacagtataaaaatagataattaaaaagatggttgccaagcaaggaaaacttattttatattttcccttccttattttaagcattgtgagtaaatcagatgttgaattcttttgccaagggaattatagctgcaggttctctctcactgccatcaaactgtaaaagattaaactgcgaagtcaagctcaacagattattttggaaagtttttgtattaagggatttagtaacatcattttgttttccaccaggcagggagtagggcttagtgttttaaaacacctctgctttctgatgttgccttaatattctgctattgcagcaattaaaaattgtcttcatgtacatttggaactaacacgtgatgtgatatattcctaaactatgaaacctttttcctagtagtcagctagatcatttgttcygggagtataaagccacccacgtaagttaataagcaaaatcctgactattatgttgttagagaaaaatgctttgctttgtctggaagaaagataaaatagtgaattataaataagtcaggccgggcgtggtggcycacacygtgaatcccagcacactgggaggccgaggcagggggactgcttgagctcaggagttcgagaccagcctgggcaacaaagtgaggactccatctctatatgaaaaacaaaaaccacggaaaggcacacacaaantaaatccagtggggntttggtaaatgtgttttagagtnaggaaatttccaggttgtt

SEQ ID NO: 41 - DNA, 2310 bp, Homo sapiens
  misc feature (681): n equals a,t,g, or c
cggacgcgtgggcggacgcgtgggttggaatttgggcttcagccccataagattccagacacagaaactctctgctatgttatgccatcatccagtgcaagatgtgctcagtttcctcgagcccaagacaaagttcattactacataaaactgaaggacttaagagatcagttgaaaggcattgaacgaaatatggacgttcaagaggtgcaatatacatttgacctacagcttgcccargaggatgcaaagaagatggctgttaaggaagaaaaatatgatccaggttatgaggcagcatatggtggtgcttacggagaaaatccatgcagcagtgaaccttgtggcttctcttcaaatgggctaattgagagcgtggagttaagaggagaatcagctttcagtggcattcctaatgggcagtggatgacccagtcatttacagaccaaattccttcctttagtaatcactgtggaacacaagaacaggaagaagaaagccatgcttaagaatggtgcttctcagctctgcttaaatgctgcagttttaatgcagttgtcaacaagtagaacctcagtttgctaactgaagtgttttattagtattttactctagtggtgtaattgtaatgtagaacagttgtgtggtagtgtgaaccgtatgaacctaagtagtttggnaagaaaaagtagggtttttgtatactagcttttgtatttgaattaattatcattccagctttttatatactatatttcatttatgaaggaaattgattttcttttggggagtcacttttaatctgtaattttaaaatacaagtctgaatatttatagttgattcttaactgtgcataaacctagatataccattatcccttttatacctaagaagggcatgctaataattaccactgtcaaagaggcaaaggtgttgatttttgtatatgaagttaagcctcagtggagtctcatttgttagtttttagtggtaactaagggtaaactcagggttccctgagctatatgcacactcagacctctttgctttaccagtggtgtttgtgagttgctcagtagtaaaaactggcccttacctgacagagccctggcttttgacctgcttcagccctgtgtgttaatcctctagtagccaattaactactctggggtggcaggttccagagaatgcagtagaccttttgccactcatctgtgttttacttgagacatgtaaatatgatagggaaggaactgaatttctccattcatatttataaccattctagttttatcttccttggctttaagagtgtgccatggaaagtgataagaaatgaacttctaggctaagcaaaaagatgctggagatatttratactctcatttaaactggtgctttatgtacatragaatgtactaaaataagtaatatagaattttycttgctaggtaaatccagtaagccaataattttaaagattctttatctgcatcattgctgtttgttactataaattaaatgaacctcatggaaaggttgaggtgtatacctttgtgattttctaatgagttttccatggtgctacaaataatccagactaccaggtctggtagatattaaagctgggtactaagaaatgttatttgcatcctctcagttactcctgaatattctgatttcatacgtacccagggagcatgctgttttgtcaatcaatataaaatatttatgaggtctcccccacccccaggaggttatatgattgctcttcyctttataataagagaaacmaattctwattgtgaatcttaacatgctttttagctgtggctatgatggattttattttttcctaggtcaagctgtgtaaaagtcatttatgttatttaaatgatgtactgtactgctgtttacatggacgttttgtgcgggtgctttgaagtgccttgcatcagggattaggagcaattaaattattttttcacgggactgtgtaaagcatgtaactaggtattgctttggtatataactattgtagctttacaagagattgttttatttgaatggggaaaataccctttaaattatgacggacatccactagagatgggtttgaggattttccaagcgtgtaataatgatgtttttcctaacatgacagatgagtagtaaatgttgatatatcctatacatgacagtgtgagactttttcattaaataatattgaaagattttaaaattcatttgaaagtctgatggcttttacaataaaagatattaagaattgttaaaaaaaaaaaaaaaa

SEQ ID NO: 42 - DNA, 406 bp, Homo sapiens
  misc feature (8): n equals a,t,g, or c
  misc feature (45): n equals a,t,g, or c
  misc feature (46): n equals a,t,g, or c
  misc feature (350): n equals a,t,g, or c
gggcacgnagcacgtcaaggacacctgagttctccaacagacggnnaacgccaagggcattcacagttctgggaggtgatctctgatgaacatgcyatcgactccgctggcacctaccacggggacagccacctgcagctggagcgcatcaacgtgtacyacmacgaggccagcggtggcaggtacgtgccccgcgctgtgctcgtggatctggagccgggcaccatggactctgtgcgctcggggcycttcgggcaggtcytcaggccagacaacttcatcttcggtsagctgygggcgarsactggggtgcggctccttagccagggcagctcaaaatccaggaacgntccaaggtaatcctgtgggaactgtggcgcagggccctgaacaacctcctatccgt

SEQ ID NO: 43 - DNA, 627 bp, Homo sapiens
  misc feature (597): n equals a,t,g, or c
  misc feature (614): n equals a,t,g, or c
  misc feature (617): n equals a,t,g, or c
aaacaatagaaagcaacagttcagagcactgcatcaagtgtactgtgctggaaaggtccgccataggaaatatggtcctccatactcctcagacaacagccttccgaaagcaaacctgtccctacctgcagatgattaaccatctatgaaccggctgggtaagcaacaagtgccatctttcatggagctgagccttaaagatcctccagtcctaaagctgacgggaagaaggtaggtgggagcagcgctgaggtttttggaacgtcctcaagtgctgtgacaccgataaactcatctttggaaaaggaacccgtgtgactgtggraccaagaagtcagcctcataccaaaccatccgtttttgtcatgaaaaatggracaaatgtcgcttgtctggtgaaggattctaccccaaggrtataagaataaatctcgtgtcatccaagaagrtaacagagtttgatcckgcwattgtcatctcycccagtgggaagtacaatgctgtcaacttgggtaaatatgaagattcaaattcagtgacatgttcagttcaacacgacaataaaactgtgcactccactgactttggaagtgaagncagattctacagatccngtnaaaccaaggg

SEQ ID NO: 44 - DNA, 745 bp, Homo sapiens
  misc feature (411): n equals a,t,g, or c
  misc feature (731): n equals a,t,g, or c
  misc feature (743): n equals a,t,g, or c
gactcgtcgcaccgaagccgccgccaccaccgcgcctccgcctcggccgccgccgcagctgctcctggtccccgtccctttgccgccctcgtcakgccagctctcctgcgccgccgcctcccgccgcgccccgccatgccgctctactccgttactgtaaaatggggaaaggagaaatttgaaggtgtagaattgaatacagatgaacctccaatggtattcaaggctcagctgtttgcgttgactggagtccagcctgccagacagaaagttatggtgaaaggaggaacgctaaaggatgatgattggggaaacatcaaaataaaaaatggaatgactctactaatgatggggtcagcagatgctcttccagaagaaccctcagccaaaactgtcttcgtagaagacatngacagaagaacagttagcatctgctatggagttaccatgtggattgacaaaccttggtaacacttgttacatgaatgccacagttcagtgtattcgttctgtgcctgaactcaaagatgcccttaaaaggtatgcaggtgccttgagagcttcaggggaaatggcttcagcgcagtatattactgcagcccttagagatttgtttgattccatggataaaacttcttccagtattccacctattattctactgcagttttgcacakggctttccacagtttgccgrgaaaggtggaacaaggacagtatcttcaacaggntgctaatggaangt

SEQ ID NO: 45 - DNA, 467 bp, Homo sapiens
  misc feature (25): n equals a,t,g, or c
  misc feature (461): n equals a,t,g, or c
agtgttcaaggagcaagagcttcancctgaagacaagggagcagtccctgaagacgcttctactgagaggtctgccatggcctctcttggcctccaacttgtgggctacatcctaggccttctggggcttttgggcacactggttgccatgctgctccccagctggaaaacaagttcttatgtcggtgccagcattgtgacagcagttggcttctccaagggcctctggatggaatgtgccacacacagcacaggcatcacccagtgtgacatctayagcacccttctgggcctgcccgctgacatccaggstgcccaggccatgatggtgacatccagtgcaatctcctycctggcctgcattatctctgtggtgggcatgagatgcacagtcttctgccaggaatcccgagccaaagacagagtggcggtagcaggtggagtctttttcatccttggangcctcc

SEQ ID NO: 46 - DNA, 722 bp, Homo sapiens
  misc feature (1): n equals a,t,g, or c
  misc feature (2): n equals a,t,g, or c
nnccctctagtcctgggtcgcggccctgcccatggggtctcaggccaggtctctgctggcagaggcggtagtaaagtccctgtaccccgtctcccagggcacaagctccctagcctctttggatccattgcccctgagctcccagagtcacccctccacctccgcagccagtgaagtgtgttgtgcctgctgaagtgatcaccccccgcccccagccctgcatcaggccacaggtcttggctttctccttatcaccatttgctgttatcacggcacacagcagggaatcccaggcccccccgccaagtggttacccaagtcaccactcctgacccaaaaatcaggcatggcattaaaacgttgcaaattcctttactgttatcccccccaccaccaggaccatgtagggtgcagtctttamtccctaacccgtttcccgaaaaaggtgctacctcctttccagacagatgagagagggcaggacttcaggctggatccaccactgggctctccctcccccagcctggagcacgggaggggaggtgacggctggtgactgatggatgggtagtgggctgagaagaggggactaggaagggctattccaggctcagccctgctcctgcagctttgccgctgagtgtaggaaaaacaggcatgacagaccagggtgagggttgtgccagctggcyacggccatgcgtggggtggcccaataaaca

SEQ ID NO: 47 - DNA, 1002 bp, Homo sapiens
  misc feature (685): n equals a,t,g, or c
  misc feature (898): n equals a,t,g, or c
  misc feature (905): n equals a,t,g, or c
  misc feature (924): n equals a,t,g, or c
  misc feature (957): n equals a,t,g, or c
gtatgaggaaatccccaagcggcgccggcagcgrggctcagaaacaggcagcgagacccatgagagtgatctggctccttcagacaaggaggctcccacacccaaggagggaacactcacccaggtccctctcgctcccccaccaccaggagccccaccttcaccagccccagcccgcttcactgcccggggtgggcgagtcttcactcccagagggtgccatctcgccggggccgaggaggagggaggccccctcctcaagtttgcccaggctggagccctccagccaagtctctggctcccaagaaacctcccacaggccctttgccaccaagtaaggagcctttgaaagagaagttgatcccagggcctctgtcccctgtggcgcgcggaggcagcaatggaggtagcaatgtgggcatggaagatggggagcgaccccgaaggaggcgacatgggagggctcagcagcaggataaaccgcctcgtttccggaggctgaagcaggaacgggagaatgccgcaaggggtctgagggcaagccctccctaacccttccagcctccgctcctggacctgaggaggccctcacaacagtcacagtggccccagcacctcgccgggcagctgccaagtctcctgatctgtcaaaccagaactcagaccaagccaatgaggaatgggnagactgcatcagagagcagtgacttcaccagtgagcgccgaggggacaaagaggcacccccaccagtactgctgacacccaaggctgtgggaactcctgggggargtggaggtggagccttaccaggtatttcagccatgtyccgcggagatctgagccagagagccaagatttgagtaaacggagcttctcaattcagcgggccagcattgnaaggcanattcggcgccttggcccanggggcaaggttggcacattggcaccagcattgnagaagccgttggggttcttgaagaaggaccgggccagacgaggga

SEQ ID NO: 48 - DNA, 2119 bp, Homo sapiens
  misc feature (2093): n equals a,t,g, or c
  misc feature (2103): n equals a,t,g, or c
  misc feature (2114): n equals a,t,g, or c
cagagaattaatttttttgtgtgctaggggagggagagtgaggagggagtgttatttccttgggaacctagggaggagaggttcctttgttgggaaacttttgttgatagctgctgcctttgtcctgatcgttttctttcccttttctctggtggcctgttgtggtgcaagagctgatggcatttgatcttgccccattcaggttggggagtgaagtgtgaggacccttttcccccgcttgctgtgaaagcacagattcattgactacagtacactgttgttcagaaaagaaggctgcaaatgacttctgagactttatgtcttttcttccagaccaagaccgtagaaggagtcacatctagccggcttagccaaagtacaggtgtatatagttcagggcacttgatttagatttggaggggctggggtgggcagagagcaagaggcgagtaaagagaatggtggtttcagagatctctcttcccaaatgtgtaaatattctataccagataagtttaaataagaaatttaattgctgcttaatttttgattatgtactttatctgtatagcaggctttgtcgtcagaagtttttatatcgatttaaattgctgctctttagcascaaacaggagcaaaatgtaaaatttttgaacttactgtgtctaatcatcatttgttagtctgtagttaatgtcaacagttaatttatgaacccacgatcgttccacactgcaccaaagtcagtcataagagaaatcgaatattctggagcactgattgcagcagggtggctcctttgtgtgcagcaggtgtagtagtcttcattttcatggtacgttttaatattaattacctaagctgccatgcatttttttttttacagttctcaaggragagcacagaacaatttctcatttcatatttggagtatgaaagtagattctattttgtaatgctgataatacctaaagatgcattgaatgcttggaagaatgctttttgatgttgattttgacctgttcatgattcagaagaaaaacaaacttttttggattttttttccctcaggtctgagtagcattgccttaaatcttatccagttagaacattgatttatttacatgatgttcagattttccagtgaaaaatacccttctgaacaaaacatgtacttactctccgaaaggcatctatctgtgctattgcaaacactccttgagattttaggggaattctaatgttgtaccctttcgtggcagctttgactgttggcatagccatttgttatgtagtggtagcgactttcctgctatgsgaatccctcccatgacgtgtatgttttacatgatgtgtgcctcttcacgcagtaaatagtttcttgttaatgtatgtttgaggagtttgaacgtcagtgtgcacttacccacaaagttattcaagttgtaaaaggttatacaataatttaacaactaccttttttattctgtcgggttactgacctcactttatgtaaatacttcgcatgacaaattcagtaactcgtctatttcagcatgcataagacttttcactagggaaactgataaagcttgagtcaactaaatctgccttcatactttatcaaggggaaccaagcctgctgtgcttacatcagcatctggaagactttcctctcctctaatctgtgtacacatctccaagcaaggaagaaaaaacaaactctgctcagacgcctatgaaacacctgaatgaactttgatgaagtacagtctgagttaccatcatgcacaagtagaactgctcttggacttgttttcctgttgtttgtggaacctacgcgtttgaatggcttgaacgttgcatcttttaaagttattttttaaggtttcttggcatttatcctagttgtccgtgtttggcaatgtgctgttaaagtaatagacttttaatctttatgtattttttgttttctctggagtacttggacagatgttatagtggtttcttttaggaaaatctgtcattaaaaaagttatagccttgcaaataaccaaaaaaaaaaaaaaaaaaaacccgggggggggcccggnacccaattcncccaaaagggnggcgg

SEQ ID NO: 49 - DNA, 494 bp, Homo sapiens
aagtcaggcttgagaaagtagaaggctgagtccttcaaggtagaagagcctgagctccagacataaaagggaaactggagacttgtttctttggcctattcattctgttttttttcccctgatcaaagaaaccaaagacagaagatgtaggatgcaggagcaatagtgagcagtcatcccataatagactggattcttctgtttctataaaggaacctcagaagctcttacctcaccttcaagccttttccttaccctgagagcctcctttaattgtctcttctttttcaggccaagaggcccagacagagttgccccaggcccggatcagctgcccagaaggcaccaatgcctwtcgttcctaywgytaytactttaatggaagaccgtggagacctgggttgatgcagatgtgagtgaggagagcatktggggagggagattcatgaagggaggggagttgccattttccatgtgttcaattggttgcaatg

SEQ ID NO: 50 - DNA, 1342 bp, Homo sapiens
  misc feature (99): n equals a,t,g, or c
  misc feature (381): n equals a,t,g, or c
caagttgttctttgtttccagcttgcattgattgctacaacatcactaatttggactttcacatttaaatggttctgtgctaatcaaaactttcgttgntattattcgttatggtagaatcatttttaattcacgtgctttgtgttcagttttgtggtctgagagatgtaccaattgtcaaattaccgtgtaccacctaatgtttataggagaaagcaaaatacatcagcttggtagttaacacatcaaatatttcttgctgcttctaggagaacttttttggtgtgtgttggaatggctgagcaaatattaaaattgttaatatgcagccatatatggaaggttcctgtggggttgttttttcgtgtttttttttttttngtggkgggattatgtgcctcccattcactagaaaatgagaaaattgtctgggttccaaaatattgacattgaatggatcaatacacacacacagacatatatatatatatgcacacatatataggcagttgcatgctagcatgggtatttttataacaatataactgagttatattggaattataaatattttcygtcacttaaatttgttctttgtttagcctgaaaacctttatggctcaagatcagattcctgactaacccctctcttagagctacagcgagctgcattaccagcttaaaacacttcttagggattaaatatagatgtaatttttcaaaatcgtttttaatttaaactgtgttttagtgtaaaattgttaaccttgtaagatggataatgtgtataagaatgtaggccttaactatttcacatgagtcaaaacaaagcagctttaaaaaaataattggaagcacaagtgcatggcctgactgaatgctgttaatatttctaaaagtttctacattcagattatatgcctgattcatagtaaaatacctctaataaacactgttttatagaaaacctgacttcagtgaatatttttgtattttacatgggccagtttatatactgctatttacactattatttcctatagctacatgttctttgtaccttttgtagttttatttgtattactagattcataccttgatggtaacgctctatctggttttgggtgtttttcatgttttagcatttgtataaagaaactggtccatgtaaatactttccatgttttttcttcaaatgtttaaaccactagttgatgtatggtatctttagatatttgcctgtctgtttgctcaaaattgcttctaaaacaataaagattcttttatttcttaaggcaaaaaaaaaaaaaaaaaaaaaaaaaaaaaaaaaaaaagggagagg

SEQ ID NO: 51 - DNA, 1527 bp, Homo sapiens
aaagacgctgactgcgccgcggagaaagccagtgggaacccagacccataggagacccgcgtccccgctcggcctggccaggcccgcgctatggagttcctctgggcccctctcttgggtctgtgctgcagtctggccgctgctgatcgccacaccgtcttctggaacagttcaaatcccaagttccggaatgaggactacaccatacatgtgcagctgaatgactacgtggacatcatctgtccgcactatgaagatcactctgtggcagacgctgccatggagcagtacatactgtacctggtggagcatgaggagtaccagctgtgccagccccagtccaaggaccaagtccgctggcagtgcaaccggcccagtgccaagcatggcccggagaagctgtctgagaagttccagcgcttcacacctttcaccctgggcaaggagttcaaagaaggacacagctactactacatctccaaacccatccaccagcatgaagaccgctgcttgaggttgaaggtgactgtcagtggcaaaatcactcacagtcctcaggcccatgacaatccacaggagaagagacttgcagcagatgacccagaggtgcgggttctacatagcatcggtcacagtgctgccccacgcctcttcccacttgcctggactgtgctgctccttccacttctgctgctgcaaaccccgtgaaggtgtrtgccacacctggccttaaagagggacaggctgaagagagggacaggcactccaaacctgtcttggggccactttcagagcccccagccctgggaaccactcccaccacaggcataagctatcacctagcagcctcaaaacgggtcartattaaggttttcaaccggaaggaggccaaccagcccgacagtgccatccccaccttcacctcggagggatggagaaagaagtggagacagtcctttcccaccattcctgcctttaagccaaagaaacaagctgtgcaggcatggtcccttaaggcacagtgggagctgagctggaaggggccacgtggatgggcaaagcttgtcaaagatgccccctccaggagagagccaggatgcccagatgaactgactgaaggaaaagcaagaaacagtttcttgcttggaagccaggtacaggagaggcagcatgcttgggctgacccagcatctcccagcaagacctcatctgtggagctgccacagagaagtttgtagccaggtactgcattctctcccatcctggggcagcactccccagagctgtgccagcagggggctgtgccaacctgttcttagagtgtagctgtaaggcagtgcccatgtgtacattctgcctagagtgtagcctaaaggcagggcccacgtgtatagtatctgtatataagttgctgtgtgtctgtcctgatttctacaactggagtttttttatacaatgttctttgtctcaaaataaagcaatgtgttttttcggaaaaaaaaaaaaaaaaaaaaaaaaaaaaaaaaa

SEQ ID NO: 52 - DNA, 630 bp, Homo sapiens
  misc feature (556): n equals a,t,g, or c
  misc feature (628): n equals a,t,g, or c
ggtttttttctcaccttgactgcaagatgaaactccttgtgctagctgtgctgctcacagtggccgccgccgacagcggcatcagccctcgggccgtgtggcagttccgcaaaatgatcaagtgcgtgatcccggggagtgaccccttcttggaatacaacaactacggctgctactgtggcttggggggctcaggcacccccgtggatgaactggacaagtgctgccagacacatgacaactgctatgaccaggccaagaagctggacagctgtaaatttctgctggacaacccgtacacccacacctattcatactcgtgctctggctcggcaatcacctgtagcagcaaaaacaaagagtgtgaggccttcatttgcaactgcgaccgcaacgctgccatctgcttttcaaaagctccatataacaaggcacacaagaacctggacaccaagaagtattgtcagakttgaatatcacctctcaaaagcatcacctctatctgcctcatctcacactgtactctccaataaagcaccttgttgaaagacmaaanaaaaaaaaaaaaaaaaaaaaaaaaaaaaaaaaaaaaaaaaaaaaaaaaaaaaaaaaaagggggggggggggncc

SEQ ID NO: 53 - DNA, 575 bp, Homo sapiens
  misc feature (575): n equals a,t,g, or c
cggactcctgccagggttgggtgcgccgctgaacggatggctgagggagccccgcggatcgtttaggaaagccggccagctgatcgtcgtgtgttgccacccattcatgtcaagatgactaagtttggatttttgcgattgtcctatgagaagcaggacacacttttgaagcttctcattctgtcaatggctgctgtattatccttctccactcgtctgtttgctgtcctgagatttgaaagtgttatccatgagtttgatccgtactttaattatcggactaccaggttcctggctgaggaggggttttataaattccataactggtttgatgaccgagcctggtaccctttgggacgaatcattggaggaacaatttacccaggtttaatgatcacctctgctgcaatctaccatgtactccattttttccacatcaccatcgacattcggaatgtctgtgtgttcctggcccctctcttctcctccttcamcamcatcgtcacgtaccaccttaccaaagagctcaaggatgcaggggctgggcttcttgctgctgccatgattgctgtagn

SEQ ID NO: 54 - DNA, 2934 bp, Homo sapiens
  misc feature (2767): n equals a,t,g, or c
gcggacggtgggcgccagcgggctgagggtaggaagtagccgctccgagtggaggcgactgggggctgaagagcgcgccgccctctcgtcccactttccaggtgtgtgatcctgtaaaattaaatcttccaagatgatctggtatatattaattataggaattctgcttccccagtctttggctcatccaggcttttttacttcaattggtcagatgactgatttgatccatactgagaaagatctggtgacttctctgaaagattatattaaggcagaagaggacaagttagaacaaataaaaaaatgggcagagaagttagatcggctaactagtacagcgacaaaagatccagaaggatttgttgggcatccagtaaatgcattcaaattaatgaaacgtctgaatactgagtggagtgagttggagaatctggtccttaaggatatgtcagatggctttatctctaacctaaccattcagagacagtactttcctaatgatgaagatcaggttggggcagccaaagctctgttacgtctccaggatacctacaatttggatacagataccatctcaaagggtaatcttccaggagtgaaacacaaatcttttctaacggctgaggactgctttgagttgggcaaagtggcctatacagaagcagattattaccatacggaactgtggatggaacaagccctaaggcaactggatgaaggcgagatttctaccatagataaagtctctgttctagattatttgagctatgsgtatatcagcagggagacctggataaggcacttttgctcacaaagaagcttcttgaactagatcctgaacatcagagagctaatggtaacttaaaatattttgagtatataatggctaaagaaaaagatgtcaataagtctgcttcagatgaccaatctgatcagaaaactacaccaaagaaaaaaggggttgctgtggattacctgccagagagacagaagtacgaaatgctgtgccgtggggagggtatcaaaatgacccctcggagacagaaaaaactcttttgccgctaccatgatggaaaccgtaatcctaaatttattctggctccagctaaacaggaggatgaatgggacaagcctcgtattattcgcttccatgatattatttctgatgcagaaattgaaatcgtcaaagacctagcaaaaccaaggctgaggcgagccaccatttcaaacccaataacaggagacttggagacggtacattacagaattagcaaaagtgcctggctctctggctatgaaaatcctgtggtgtctcgaattaatatgagaatacaagatctaacaggactagatgtttccacagcagaggaattacaggtagcaaattatggagttggaggacagtatgaaccccattttgactttgcacggaaagatgagccagatgctttcaaagagctggggacaggaaatagaattgctacatggctgttttatatgagtgatgtgtctgcaggaggagccactgtttttcctgaagttggagctagtgtttggcccaaaaaaggaactgctgttttctggtataatctgtttgccagtggagaaggagattatagtacacggcatgcagcctgtccagtgctagttggcaacaaatgggtatccaataaatggctccatgaacgtggacaagaatttcgaagaccttgtacgttgtcagaattggaatgacaaacaggcttccctttttctcctattgttgtactcttatgtgtctgatatacacatttcctagtcttaactttcaggagtttacaattgactaacactccatgattgattcagtcatgaacctcatcccatgtttcatctgtggacaattgcttactttgtgggttcttttaaaagtaacacgaaatcatcatattgcataaaaccttaaagttctgttggtatcacagaagacaaggcagagtttaaagtgaggaattttatatttaaagaactttttggttggataaaaacataatttgagcatccagttttagtatttcactacatctcagttggtgggtgttaagctagaatgggctgtgtgataggaaacaaatgccttacagatgtgcctaggtgttctgtttacctagtgtcttactctgttttctggatctgaagactagtaataaactaggacactaactgggttccatgtgattgccctttcatatgatcttctaagttgatttttttcctcccaagtcttttttaaagaaagtatactgtattttaccaaccccctctcttttcttttagctcctctgtggtgaattaaacgtacttgagttaaaatatttcgatttttttttttttttaatggaaagtcctgcataacaacactgggccttcttaactaaaatgctcaccacttagcctgtttttttatcccttttttaaaatgacagatgattttgttcaggaattttgctgtttttcttagtgctaataccttgcctcttattcctgctacagcagggtggtaatattggcattctgattaaatactgtgccttaggagactggaagtttaaaaatgtacaagtcctttcagtgatgagggaattgattttttttaaaagtctttttcttagaaagccaaaatgtttgtttttttaagattctgaaatgtgttgtgacaacaatgacctatttatgatcttaaatcttttttaaaaaaatgtttgttttctgtgtggtgtttttngtatttaaatccgaatgtatgatgtggcagtaacaggttaacttatgtaatttctttagtacatagggcttaggtttatactcttggtttccactcacactaatgtcacatggttaagaaaaacttaggctctctgaagtttcagatatttcatgaatcaagatgtg

SEQ ID NO: 55 - DNA, 575 bp, Homo sapiens
  misc feature (6): n equals a,t,g, or c
ggtaangctatttggttttackascargctctggaatatttagcagtcattttcactggcacaagagccttttgtatgttattcaatttaaacttttaaaccaaaaattttatggtccagtgtctttggcaaaaagatgctggagggaatgtaacatacaattaatatgtggttatatatatatataaaaagacacaaattgccatgttatggttctgccttgaaacagcacaatgaagtgtatcagtatattctgtgattatgaaacttatatgttgtgttgttttgtgtcttctgttgcctgtcctttgggccagatgtgggccagttaaatgcagttatcatctcattaaatacagatgcagataaaatatctttagtgctgcaacattttacctaactttttgtatgttttcatgactgtgtgttattttccaaagctgttcctacctcaccatgaggctttatggattgttatgtattataaatgttctatatgagacagactactgtgtttcttctcatttattaaaagttaagtagaaaaataaactaattttaatatctaaaaaaaa

SEQ ID NO: 56 - DNA, 1140 bp, Homo sapiens
  misc feature (563): n equals a,t,g, or c
  misc feature (1115): n equals a,t,g, or c
  misc feature (1119): n equals a,t,g, or c
  misc feature (1135): n equals a,t,g, or c
gattctgcgtgcgcaaattttatttttcctcccgtactttatctacagctgcattctgggactgatatcctgttccggtgttcctgcgggtaaactatgagctgaagatgttgatcatgatggtggccttggtgggctacaacaccatcctactccacacccacgcccacgtcctggggactacagccaggtcttatttgagagaccaggcatttggaaagacctgaagaccatgggctctgtgtctctctctatattcttcatcacactgcttgttctgggtagacagaatgaatattactgtaggttagacttcttatggaagaacaaattcaaaaaagagcgggaggagatagagaccatggagaacctgaaccgcgtgctgctggagaacgtgcttcccgcgcacgtggctgagcacttcctggccaggagcctgaagaatgaggagctataccaccagtcctatgactgcgtctgcgtcatgtttgcctccattccggatttcaaagaattttatacagaatccgacgtgaacaaggagggcttggaatgccttcggntcctgaacgagatcatcgctgactttgatgatcttctttccaagccaaaattcagtggagttgaaaagattaagaccattggcagcacatacatggcagcaacaggtctgagcgctgtgcccagccaggagcactcccaggagcccgagcggcagtacatgcacattggcaccatggtggagtttgcttttgccctggtagggaagctggatgccatcaacaagcactccttcaacgacttcaaattgcgagtgggtattaaccatggacctgtgatagctggtgtgattggagctcagaagccacaatatgatatctggggcaacactgtcaatgtggccagtaggatggacagcaccggagtcctggacaaaatacaggttaccgaggagacgagcctcgtcctgcagaccctcggatacacgtgcacctgtcgaggaataatccaacgtgaaagggaaagggggacctgaaagacgtactttgttaaacacagaaatgttcaaggttcccttttcccagagcaacgtgggcattcctgaaagagttcancttncatttttgggccaagnaagac

SEQ ID NO: 57 - DNA, 255 bp, Homo sapiens
  misc feature (251): n equals a,t,g, or c
agcggsttgctggtgttgagtgtcctgttgggggctgtctttggcaaggaggactttgtggggcatcaggtgctccgaatctctgtagccgatgaggcccaggtacagaaggtgaaggagctggaggacctggagcacctgcagctggacttctggcggggscctgcccaccctggctcccccatcgacgtccgagtgcccttycccagcatccaggcggtcaagatctttctggagttccacggcatcanttat

SEQ ID NO: 58 - DNA, 1254 bp, Homo sapiens
ggtcacgagggcagcatgcgggggttgctggtgttgagtgtcctgttgggggctgtctttggcaaggaggactttgtggggcatcaggtgctccgaatctctgtagccgatgaggcccaggtacagaaggtgaaggagctggaggacctggagcacctgcagctggacttctggcggggscctgcccaccctggctcccccatcgacgtccgagtgcccttccccagcatccaggcggtcaagatctttctggagtcccacggcatcagctatgagaccatgatcgaggacgtgcagtcgctgctggacgaggagcaggagcagatgttcgccttccggtcccgggcgcgctccaccgacacttttaactacgccacctaccacaccctggaggagatctatgacttcctggacctgctggtggcggagaacccgcaccttgtcagcaagatccagattggcaacacctatgaagggcgtcccatttacgtgctgaagttcagcacggggggcagtaagcgtccagccatctggatcgacacgggcatccattcccgggagtgggtcacccaggccagtggggtctggtttgcaaagaagatcactcaagactacgggcaggatgcagctttcaccgccattctcgacaccttggacatcttcctggagatcgtcaccaaccctgatggctttgccttcacgcacagcacgaatcgcatgtggcgcaagactcggtcccacacagcaggctccctctgtattggcgtggaccccaacaggaactgggacgctggctttgggttgtccggagccagcagtaacccctgctcggagacttaccacggcaagtttgccaattccgaagtggaggtcaagtccattgtagactttgtgaaggaccatgggaacatcaaggccttcatctccatccacagctactcccagctcctcatgtatccctatggctacaaaacagaaccagtccctgaccaggatgagctggatcagctttccaaggctgctgtgacagccctggcctctctctacgggaccaagttcaactatggcagcatcatcaaggcaatttatcaagccagtggaagcactattgactggacctacagccagggcatcaagtactccttcaccttcgagctccgggacactgggcgctatggcttcctgctgccagcctcccaratcatccccacagccaattagggtgattcaaggtgtctaattctagatcgcgaa

SEQ ID NO: 59 - DNA, 1190 bp, Homo sapiens
  misc feature (1122): n equals a,t,g, or c
  misc feature (1172): n equals a,t,g, or c
agggccgccgtccagagccgccatcttgtgggagcaaaaccaacgcctggctcggagcagcagcctctgaggtgtccctggccagtgtccttccacctgtccacaagcatggggaacatcttcgccaacctcttcaagggcctttttggcaaaaaagaaatgcgcatcctcatggtgggcctggatgctgcagggaagaccacgatcctctacaagcttaagctgggtgagatcgtgaccaccattcccaccataggcttcaacgtggaaaccgtggagtacaagaacatcagcttcactgtgtgggacgtgggtggccaggacaagatccggcccctgtggcgccactacttccagaacacacaaggcctgatcttcgtggtggacagcaatgacagagagcgtgtgaacgaggcccgtgaggagctcatgaggatgctggccgaggacgagctccgggatgctgtcctcctggtgttcgccaacaagcaggacctccccaacgccatgaatgcggccgagatcacagacaagctggggctgcactcactacgccacaggaactggtacattcaggccacctgcgccaccagcggcgacgggctctatgaaggactggactggctgtccaatcagctccggaaccagaagtgaacgcgacccccctccctctcactcctcttgccctctgctttactctcatgtggcaaacgtgcggctcgtggtgtgagtgccagaagctgcctccgtggtttggtcaccgtgtgcatcgcaccgtgctgtaaatgtggcagacgcagcctgcggccaggctttttatttaatgtaaatagtttttgtttccaatgaggcagtttctggtactcctatgcaatattactcagctttttttattgtaaaaagaaaaatcaactcactgttcagtgctgagaggggatgtaggcccatgggcacctggcctccaggagtcgctgtgttgggagagccggccacgcccttggctttagagctgtgttgaaatccattttggtggttggtttttaacccaaactcagtggcattttttaaaatagttaagatccaatcgggaacattgaacacacagaaggggacccgctagcnagatttgcagtacggcctggtgcatcgccagccagtgttcctcggaaatnagtgtgtgggcagacttg

SEQ ID NO: 60 - DNA, 580 bp, Homo sapiens
  misc feature (530): n equals a,t,g, or c
  misc feature (575): n equals a,t,g, or c
attcggcacaggcgcggaccggaagtctaagtggaatcccggttggcttggggcgcaggcttccaacttcgtactctggcctctgcgtctcggctcgtcggttgggtacccgaacccagctactgctgcttgaagagaagatggatggggactcctcgccgtcgctgcgccgccggccttccctgggcggacgtacacctttgcgaacgtcagtgaggacccagggcccctccttggaatagctcttatttctcaagcgctgcagcgtgaagctcgctctgcgggtccgagaggcctgcgatctgaagactgaaaactgggaagagacgctctaccctgtgctcctcgccggcttcgataggagccgcagtgcctgggattttctcaaactttgtcccaaacttcagctgtgggagtggaggaacaaacaggcctctcccagaattgtgaaagagatcgccctggtggatgaaacaaaaacaaatgcacttgacttcmacgccttgcctggcgttgtcacgcggggtttnaatgtatgtggccacattttaaattccaaagtattttcttctaangggct

SEQ ID NO: 61 - DNA, 453 bp, Homo sapiens
  misc feature (383): n equals a,t,g, or c
  misc feature (403): n equals a,t,g, or c
  misc feature (418): n equals a,t,g, or c
ttggctcacattcatgtcttgtttttgttactggtttgaagactaaaaggcacgggttcaaataagattggtctctttggttggagactatttctgggttcattcagttgttcaagaaacattagttaagcacctactgttgctagacactatgctagatactgaggataatgaaggtaagattgatatagtccctgcccttatggagcttatagtctcatgtggtcttagtgaacaaagtctcaatttgcttttatactagaaataataaagaaagctgccttgctgtattcgatcagttaaaatcagcaatttgtgcttttgtatcagtaaaacatttagttctcaccttttgaaaatgccaaccacggaagggattacancccccccattttgggcgganaagggttccgttcgngagacattttccaattttgggggacttcactttcc

SEQ ID NO: 62 - DNA, 2593 bp, Homo sapiens
  misc feature (20): n equals a,t,g, or c
cccctgacatggaaaacatnagaacctgagctgctgttaatcacctccaatcagccggttcaaccagccccattctggccgcggctcagtccttgcatcgggaagctaccaagtggtctagtaagggcaatgacatcattgcagcagccaagcgcatggctctgctgatggctgagatgtctcggctggtaagagggggcagtggtaccaagcgggcactcattcagtgtgccaaggacatcgccaaggcctcagatgaggtgactcggttggccaaggaggttgccaagcagtgcacagataaacggattagaaccaacctcttacaggtatgtgagcgaatcccaaccataagcacccagctcaaaatcctgtccacagtgaaggccaccatgctgggccggaccaacatcagtgatgaggagtctgagcaggccacagagatgctggttcacaatgcccagaacctcatgcagtctgtgaaggagactgtgcgggaagctgaagctgcttcaatcaaaattcgaacagatgctggatttacactgcgctgggttagaaagactccctggtaccagtaggcacctggctgagcctggctggcacagaaacctctactaaaaagaaggaaaatgatctgagtcccaggagctgcccagagttgctgggagctgaaaaatcacatcctggcctggcacatcagaaaggaatgggggcctcttcaaattagaagacatttatactcttttttcatggacactttgaaatgtgtttctgtataaagcctgtattctcaaacacagttacacttgtgcaccctctatcccaataggcagactgggtttctagcccatggacttcacataagctcagaatccaagtgaacactagccagacactctgctctgcccttgttccctaggggacacttccctctgtttctctttccttggctcccattcactcttccagaatcccaagacccagggcccaggcaaatcagttactaagaagaaaattgctgtgcctcccaaaattgttttgagctttccatgttgctgccaaccataccttccttccctgggctgtgctacctgggtccttttcagaagtgagctttgctgctacaggggaaggtggcctctgtggagccccagcatatgggggcctggattcatttcctgcccttcctcagtttaatccttctagtttcccacaatataaaactgtacttcactgtcaggaagaaatcacagaatcatatgattctgcttttaccatgcccctgagcaatgtctgtgctagggaaacttcccgtcccatatcctgcctcagcccgccaaggtagccatcccatgaacacactgtgtcctggtgctctctgccactggaagggcagagtagccagggtgtggccctgccatcttcccagcagggccactcccggcactccatgcttagtcactgcctgcagaggtctgtgctgaggccttatcattcattcttagctcttaattgttcattttgagctgaaatgctgcattttaattttaaccaaaacatgtctcctatatcctggtttttgtagccttcctccacatcctttctaaacaagattttaaagacatgtaggtgtttgttcatctgtaactctaaaagatcctttttaaattcagtcctaagaaagaggagtgcttgtcccctaagagtgtttaatggcaaggcagccctgtctgaaggacacttcctgcctaagggagagtggtatttgcagactagaattctagtgctgctgaagatgaatcaatgggaaatactactcctgtaattcctacctccctgcaaccaactacaaccaagctctctgcatctactcccaagtatggggttcaagagagtaatgggtttcatatttcttatcaccacagtaagttcctactaggcaaaatgagagggcagtgtttcctttttggtacttattactgctaagtatttcccagcacatgaaaccttattttttcccaaagccagaaccagatgagtaaaggagtaagaaccttgcctgaacatccttccttcccacccatcgctgtgtgttagttcccaacatcgaatgtgtacaacttaagttggtcctttacactcaggctttcactatttcctttawaatgaggatgattattttcaaggccctcagcatatttgtatagttgcttgcctgatataaatgcaatattaatgcctttaaagtatgaatctatgccaaagatcacttgttgttttactaaagaaagattacttagaggaaataagaaaaatcatgtttgctctcccggttcttccagtggtttgagacactggtttacactttatgccggatgtgcttttctccaatatcagtgctcgagacacagtgaagcaaattaaaaaaaaaaaaaaaaaaaaatccctgaatgatgattagagacatcaccgctaaaaaactacatttataagctaggatttgttatatgcaaatattttctgcctcttcttttgttctgtttaaaacaataaaatgcatttgtataaaaaaaaaaaaaaaaaactcgta

SEQ ID NO: 63 - DNA, 1195 bp, Homo sapiens
  misc feature (80): n equals a,t,g, or c
  misc feature (83): n equals a,t,g, or c
  misc feature (115): n equals a,t,g, or c
ggtttctcttgcagttcacagagaattggggctctcttcatgcctgaaatttggggtccatagtgaatattttgttattnatnkkttggctcattctttatatagtaatggaaancataagtctaggagttagaaatgaattttttagaccttagtaaaaccatttaaccataaaatggacaactgagaattctcccagctgcctgaaagcgtcgccaactgtggttatcctgcaagctgctacctgcaacttggacgttgtttccacgtgctctgctggctacgattcttgcattctgggtttggcttttttctgtgtcatcaactatggttatcctctaaataggcatttaatgaaacattgtacaaattgtcactcatttgatgacacctgggaataacattagcaggctgatgtcctgcaccattatgtttactaatcacatgttctgtgtgctgtgacgactgtcaaagagtatctggccatggcggacactcagcatttgttgattgaataaatgttagctcttctcattgtgaaggactcacttttactgggataaacaaatgcagttaagaattctggcacccttgtaaggaagaaaagagagttcaacaccttcgagtctgagcgcttgtggctagagtttgccaggagggaggaaaccagtgaccctgaaaactgagggtgcctcaggagcagtgggaccacctgatgctgaaggacggactaatgatgtttcctcttgccttctctggtgcctccattgccctcatggaacagagcatatcatagagggagaaaagtcaaacttgtaattgtgtcttacagttactggsttcatcttccttgggatatatggtcatcctctaatgagtgtaaaagtgcgcaaaacacatccttattgttcctgatctcttagtcccataaatgggaacaaatacagctttctgcttctttctttttggggaaaggacagggtgctagtgagtactgacagcatgccagctaccraagtcacccagccattcccatgagcagcagttcatttaattgtcacagcgtcgccmggaagaagatctgataaacctaggtttacagatgaagaaagcaaaatgtagagatgttgttgaggtcacagaggtgactgcctaacttcagagcagggcttctgatccctttaagaaattacgt

SEQ ID NO: 64 - DNA, 392 bp, Homo sapiens
acggcagtgctcttgcttgtttacatgccaaagtgctctgtggaagaggtgacgaaagggtggcatccctgggtaagtaagtgcctatgaagaagtagcccaaccaatggctttgcagcacacaatgtcccagtggggaaactgagggccagagaggggaagggacatgtccaaggtcacatggtgatgggacacccagggctgggccactggtccgtgcctgacctccagtgggtctgccagccaagggtgaggaaggctgtggggaggggaggtggccaagtcaggcttccccctccacctcgtcctcgctggcacagccctcggacacagctctgcgccgggatgcccgcctctccaggtactctgccttaagcygctctacttcaatt

SEQ ID NO: 65 - DNA, 1290 bp, Homo sapiens
  misc feature (229): n equals a,t,g, or c
  misc feature (231): n equals a,t,g, or c
  misc feature (233): n equals a,t,g, or c
ggaagggcagtcgtccgcgctggctgggcagggagcggcacagcgagccggggaccccggcgccgcccgcgcgcggccccgtctgaggtctggcagtcagagacagccgggcgcccacggcccgagcgcccacggcagcaccatgcccgcactcctggagcgccccaagctttccaacgccatggccagggcgctgcaccggcacattatgatggagcgggagcgcaangncnaggaggaagaagaggtggataagatgatggaacagaagatgaaggaagaacaggagagaaggaagaaaaaggagatggaagagagaatgtcattagaggagaccaaggaacaaattctgaagttggaggagaagcttttggctctacaggaagagaagcaccagcttttcctgcagctcaagaaagttttacatgaggaagaaaaacggaggcgaaaggaacagagtgacctgaccaccctgacatcagctgcataccagcagagcctgactgttcacacaggaactcatctcctcagcatgcaggggagccctggaggacacaatcgcccaggcaccctcatggcagctgacagagccaaacaaatgtttggaccccaagtgcttacgacccggcactacgtgggctcagcagctgcttttgcagggacaccagagcatggacaattccaaggcagtcctggtggtgcctatgggactgctcagcccccacctcactatgggcccacacagccagcttatagtcctagtcagcagctcagagctccttcggcattccctgcagtgcagtacctatctcagccacagccacagccctatgctgtgcatggccactttcagcccactcagacaggtttcctccagcctggtggtgccctgtccttgcaaaagcagatggaacatgctaaccagcagactggcttctccgactcatcctctctgcgccccatgcacccccaggctctgcatccagcccctggactccttgcttccccccagctccctgtgcagatgcagccagcaggaaagtcgggctttgcagctaccagccaacctggccctcggctccccttcatccaacacagccagaacccgcgattctaccacaagtgaccatcagattatatcttcaacaccacaccccccaccccatcgtgggtgagggtatcccctgtgtgtcccaggccaataaaatctacctgccactgcmaaaaaaaaaaaaaaaaactcgactcgtgccgctcgtgccaattcggcagagctccttcttttgtttt

SEQ ID NO: 66 - DNA, 716 bp, Homo sapiens
  misc feature (93): n equals a,t,g, or c
  misc feature (98): n equals a,t,g, or c
attcactgctgctcagcatggctcagaccaactcatgcttcatgctgatctcctgcctgatgttcctgtgtctgaagccaagggcaggagggncatgntgagttgcccaaggcccagatcagctgcccagaaggsaccagtgcctaaggstcccactgctactactttaatgaagagcatgagacctgggtttatgcagatctctactgccagaacatgaattcaggtaacctggtgtctgtgctcacccaggctgagggtgcctttgtggcttcgctgattaaagagagtggcaccaaggatagcaatgtctggattggcctccatgacccccaccggatcagtctgctgcatcttctacctcctgattatcaggttccagagggtctgatgtctggcacctcaagcatcagtttttactatattatgataaaagcaacctctctataaatcatataatgtaaaggatatcaaggttctccataggttcttcgagataagcttaaagctgaatttcctgtgtgtttcaggcattcacagataaactcattctctgtacttctagggtagcatctttatgtatctattatgtacctcttatctattgtgttatcatctctgttatagaagagccttctgtagaccatatagaaaaagattatagaggaggagaatctactgctggcaattgggaaccgcaagtattactaaataat

SEQ ID NO: 67 - DNA, 1126 bp, Homo sapiens
  misc feature (416): n equals a,t,g, or c
  misc feature (1109): n equals a,t,g, or c
  misc feature (1113): n equals a,t,g, or c
ggcacgagctgcacagtactcttggtttatcaatgggacgttccagcaatccacacaagagctctttatccccaacatcactgtgaataatagcggatcctatatgtgccaagcccataactcagccactggcctcaataggaccacagtcacgatgatcacagtctctggaartgctcctgtcctctcagctgtggccaccgtcggcatcacgattggagtgctggccagggtggctctgatatagcagccctggtgtattttcgatatttcaggaagactggcagattggaccagaccctggaattcttctagctcctccaatcccattttatcccatggaaccactaaaaacaaggtctgctctgctcctgaagccctatatgctggagatggacaacttcaatgaaaatttnaaagggaaaaccctcaggcctgaggtgtgtgccactcagagacttcacctaactagagacaggcaaactgcaaaccatggtgagaaattgacgacttcacactatggacagcttttcccaagatgtcaaaacaagactcctcatcatgataaggctcttacccccttttaatttgtccttgcttatgcctgcctctttcgcttggcaggatgatgctgtcattagtatttcacaagaagtagcttcagagggtaacttaacagagtatcagatctatcttgtcaatcccaacgttttacataaaataagagatcctttagtgcacccagtgactgacattagcagcatctttaacacagccgtgtgttcaaatgtacagtggtccttttcagagttggacttctagactcacctgttctcactccctgttttaattcaacccagccatgcaatgccaaataatagaattgctccctaccagctgaacagggaggagtctgtgcagtttctgacacttgttgttgaacatggctaaatacaatgggtatcgctgagactaaagttgtaagaaatttaacaaatgtgctggcttgggttaaaatggggctacactycatctgactcattctttawtcyattttaagttggggtttggaaaccttggcccaaagggggcgtaagtcccaacccctngggnaattaaccccccc

SEQ ID NO: 68 - DNA, 2139 bp, Homo sapiens
  misc feature (2067): n equals a,t,g, or c
  misc feature (2123): n equals a,t,g, or c
  misc feature (2138): n equals a,t,g, or c
aattccaggacaccccacctctcaaaggtttctgacttccttgtcccaaaatattaatccttctgctccagattccaatgatcagcaccaagaggtccccttttccttctgccaggcattggccctgctgataggactcttggtcacttagttaaaatcacagtggcccaaggaaggaacctcctgagcttgattaccctcactatggagcagaaggacctggccctggacacagggcggtgcacagtataaactaaccactgcctgacctgagctttggctgaaatgacacacaggyctytgcactgcccacctctccaacctgaggcagaacaagtaggcgatgatttgcactgcatgattctcagtgtgaaagtctatgttggcaaaggatatttcaagtggaacttagaagctattccttaaggctaggacgaacaccacgctacacgcgaaggctatcctatttgataaagatcaaaaactagcaaacaaaaatctccagctgcccacgttgctttggtcatgacccttccttcagatcacttctgcctttatttttgctgtttaggggatgtgttatcacagaaacttggaatgcagagaaatgttatcacagaaacttggaatgcagaaaaatttttscytttyaggggaggtgttatcacagaaacttggaatacaaagacctscccccaccgcagccctgccccaccccacctaccccctgctggatttagcactgcacttccattttagcagtgatttccttcctttttgccctcgcctgccttccagtaacacataatttccttctatttccagagctgtcgatgatgaaatcgaggccaatcttgaagagttcgacatcagcgaggatgacattgatgatggattcaggagactgtttgcccagttggcaggagaggatgcggagatctctgcctttragctgcagaccatcctgagaagggttctagcaaagcgccaagatatcmagtcagatggcttcagcatcgagacatgcaaaattatggttgacatgctarattcggacgggagtggcaagctggggctgaaggagttctacattctctggacgargattcaaaaataccaagtaaratccsagaaatgcgggtggatctgtgttgggaaacattctgttcatatgctttaagatgcagcaactcctgcacagagtggagaaacatttccaaggggattgggattttacccataatgaagctcagagtgagtaaagatggggctgaggaaatgcaaacaaaaaaccaaccaggacttcgcaggtgaaatggcctattcccttcctcctgattattgggatcatctaaaggccaccatcaagggtttcctgaaaagggtttttgacagctaaagtacaaaaattatataagacaagaacatggacctatgggcgttggctggctgatttratgggcatatttacaaaccagctcacagacagaagcaaaatactattagttatttaaggcagaaacataagtgattcttccacggccaaactagaggcacagagctggaaaaacttcatccccactcagcacatactagggaggtaacttgccagctttgctttgggtcatagttcttacagckaacttatgtgttcagaaaatttaccgagaaatcgacgttgacaggtctggtaccatgaattctatgaaatgcggaaggattagaagaagcaggtttcaagatgccctgtcaactccaccaagtcatcgttgctcggtttgcagatgaccagctcatcatcgattttgataattttgttcggtgtttggttcggctggaaacgctattcaagatatttaagcagctggatcccgagaatactggaagaatagagctcgaccttatctcttggctctgtttctcagtactttgaagttataactaatctgcctgaagacttctcatgatgggaaaatcagccaagggacttaagcttccataggaaatacactttgtatctgggacctccaaaattatgggggaaccatttaactttaaacgggtggnccataggctggaaaattattggttactgtccattttggaggttggccggaagtttncacacctccaaggtna

SEQ ID NO: 69 - DNA, 1341 bp, Homo sapiens
  misc feature (20): n equals a,t,g, or c
  misc feature (376): n equals a,t,g, or c
cggacgcatggggactccangaaaacccatggccatgaggttgatcctgttttttggtgccctttttgggcatatctactgtctagaaacatttgtgggagaccaagttcttgagattgtaccaagcaatgaagaacaaattaaaaatctgctacaattggaggctcaagaacatctccagcttgatttttggaaatcacccaccaccccaggggagacagcccacgtccgagttcccttcgtcaacgtccaggcagtcaaagtgttcttggagtcccagggaattgcctattccatcatgattgaagacgtgcaggtcctgttggacaaagagaatgaagaaatgcttttwaataggagaagagaacggakggtnaacttcaattttggggcctaccataccctggaagagatttcccaagaaatggataacctcgtggctgagcaccctggtctagtgagcaaagtgaatattggctcttcttttgagaaccggcctatgaacgtgctcaagttcagcaccggaggagacaagccagctatctggctggatgctgggatccatgctcgagagtgggttacacaagctacggcactttggacagcaaataagattgtttctgattatggaaaggacccatccatcacttccattctggaygccctggatatcttcctcctgccagtcacaaaccctgatggatacgtgttctctcaaaccaaaaatcgtatgtggcggaagacccggtccaaggtatctggaagcctctgtkttggtgtggatcctaaccggaactgggatgcaggttttggaggacctggagccagcagcaacccttgctctgattcataccacggacccagtgccaactctgaagttgaagtgaaatccatagtggacttcatcaagagtcatggaaaagtcaaggccttcattaccctccacagctattcccagctgctgatgttcccctatgggtacaaatgtaccaagttagatgactttgatgagctgagtgaagtggcccaaaaggctgcccaatctctgagaagcctgcatggcaccaagtacaaagtgggaccaatctgctctgtcatctaccaagccagtggaggaagcattgactggtcctatgattatggcatcaagtactcatttgcctttgaactgagagacacagggcgctacggcttcctcttgccagcccgtcagatcctgcccacagccgaggagacctggcttggcttgaaggcaatcatggagcatgtgcgagaccacccctattagggccctggggaagaaacaagagccattaaaatctctttggtttgaagcaaaaa

SEQ ID NO: 70 - DNA, 735 bp, Homo sapiens
  misc feature (628): n equals a,t,g, or c
  misc feature (730): n equals a,t,g, or c
  misc feature (732): n equals a,t,g, or c
cagcctgaccctaagcctggttctcctcggctcctcctggggctgcggcattcctgccatcaaaccggcactgagcttcagccagaggattgtcaacggggagaatgcagtgttgggctcctggccctggcaggtgtccctgcaggacagcagcggcttccacttctgcggtggttctctcatcagccagtcctgggtggtcactgctgcccactgcaatgtcagccctggccgccattttgttgtcctgggcgagtatgaccgatcatcaaacgcagagcccttgcaggttctgtccgtctctcgggccattacacaccctagctggaactctaccaccatgaacaatgacgtgacgctgctgaagctcgcctcgccagcccagtacacaacacgcatctcgccagtttgcctggcatcctcaaacgaggctctgactgaaggcctcacgtgtgtcaccaccggctggggtcgcctcagtggcgtgggcaatgtracaccagcacatctgcagcaggtggctttgcccctggtcactgtgaatcagtgccggcagtactggggctcaagttatcaytgactccatgatctgtgcagtgccaaaggttgcctcctccgtgccaaggtngactccgaaaagccctctttgttctgcccaaaaaaggaaaacacatgggttggcttattgggtatttgttctcccctgggggcaacccaaaaactgcaatgntngcg

SEQ ID NO: 71 - DNA, 2030 bp, Homo sapiens
gggcagagcaccgcgtctcccgccttctccgcagccccgcagccccgggccctgtcattcccagcgctgccctgtcttgcgttccagtgttccagcttctgcgagatgaccctcaaggcgagcgagggcgagagtgggggcagcatgcacacggcgctctccgacctctacctggagcatttgctgcagaagcgtagtcggccagaggctgtatcgcatccattgaatactgtgaccgaggacatgtacaccaacgggtctcctgccccaggtagccctgcccaggtcaagggacaggaggtgcggaaagtgcgactcatacagtttgagaaggtcacagaagagcccatgggaatcackctgaagctgaatgaaaaacagtcctgtacggtggccagaattcttcatggtggcatgatccatagacaaggctcccttcacgtgggggatgagatcctagaaatcaatggcacaaatgtgacaaatcattcagtggatcagctgcagaaggcgatgaaagaaaccaaaggaatgatctcattaaaagtaattcccaaccagcaaagccgtcttcctgcactacagatgttcatgagagcgcagtttgactatgatcccaaaaaggacaatctgatcccttgcaaggaggcgggactgaagtttgctactggggacattatccagattatcaacaaggatgacagcaattggtggcagggacgggtggaaggctcctccaaggagtcagcaggattgatcccttcccctgagctgcaggaatggcgagtggcaagtatggctcagtcagctcctagcgaagcccgagctgcagtccctttgggaagaagaagaagtacaaagacaaatatctggccaagcacagctcgatttttgatcagttggatgttgtttcctacgaggaagtcgttcggctccctgcattcaagaggaagaccctggtgctgatcggagccagtggggtgggtcgcagccacattaagaatgccctgctcagccagaatccggagaagtttgtgtaccctgtcccatatacaacacggccgccaaggaagagtgaggaagatgggaaggagtaccactttatctcaacggaggagatgacgaggaacatctctgccaatgagttcttggagtttggcagctaccaaggcaacatgtttggcaccaaatttgaaacagtgcaccagatccataagcagaacaagattgccatccttgacattgagccccagaccctgaaaattgttcggacagcagaactttcgcctttcattgtgttcattgcacctactgaccagggcactcagacagaagccctgcagcagctgcagaaggactctgaggccatccgcagccagtacgctcactactttgacctctcactggtcaataatggtgttgatgaaacccttaagaaattacaagaagccttcgaccaagcgtgcagttctccacagtgggtgcctgtctcctgggtttactaagcttgtagaatgggggaacccactgtatgcccctctccagcatttggaattccacccgccttgctttaagacaaacagggctgctccaactagttttgtgtcagcttccagctctctgcagctatcctaattcagccagtaaggttcagtcttcttgctcaggctcctgaagggttgattctcctgatagatggggccccactgatctggatttgaaaaggatttctagaaattgggggtaagaagtactaccaaaatgtaactgctaatcaagggtgatgcacagcaaaagcaatggaccccatccctctaaagcctgccctcctttgccttcaactgtatatgctgggtatttcatttgtctttttattttggagaaagcgtttttaactgcaactttctataatgccaaaatgacacatctgtgcaatagaatgatgtctgctctagggaaaccttcaaaagcaataaaaatgctgtgttgaaatgccaaaaaaaaaaaaaaaaaaaaaaaaaaaaaaaaaa

SEQ ID NO: 72 - DNA, 1875 bp, Homo sapiens
  misc feature (3): n equals a,t,g, or c
  misc feature (339): n equals a,t,g, or c
  misc feature (350): n equals a,t,g, or c
gantgtttgagctactctgtgacatttaatcattaatagaagatttggggtatacactacagatgggccctgtttgctgaaatgttggggccaaacaacttgatagagcctatgatgttcctttcaagctttctaaagtttccaccaacctcagatgaaaatgtaactgtgagaagtaaatttaacaacattgttgtctgcatatgtgtgccaaaatggaagacagaatcatgaaaaagaagcttattttataaccatggtggtggctcatgtttgagtagtaatgctccttggtctggccactgaagaatgacagagcccagggccccggtcccatcntgccatcactngctttggagccccagggtaactcctgccagtaacagagascaagcgggacgttcaccatgggaagaaaatcgctgtaccttctgattgtggggatcctcatagcatattatatttatacgcctctcccagataacgttgaggagccrtggagaatgatgtggataaacgcacatctgaaaactatacaaaatttggttgtcgggagctttgatgaagtcccaccaacctcagatgaaaatgtcactgtgactgagacaaaattcaacaacattcttgttcgggkatatgtgccaaagagaaagtctgaagcactaagaagggggttgttttacatccatggtggaggctggtgcgtgggaagtgctgctctaagtggttatgacttgctgtcaagatggacagcagacagacttgatgctgtcgtcgtatcaaccaactacagattagcacctaagtatcatttcccaattcaatttgaagatgtatataatgccttaaggtggttcttacgtaaaaaagttcttgcaaaatatggtgtgaaccctgagagaatcggtatttctggagatagtgcaggagggaatttagctgcagcagtgactcaacagctccttgatgacccagatgtcaagatcaaactcaagatccagtctttaatttatcctgcccttcagcctcttgatgtagatttaccgtcatatcaagaaaattcaaattttctatttctatccaaatcactcatggtcagattctggagtgaatattttaccactgatagatcacttgaaaaagccatgctttccagacaacatgtacctgtggaatcaagtcatctcttcaaatttattaattggagttccctgctccctgagaggtttataaaaggacatgtttataacaatccaaattatggcagttctgagctggctaaaaaatatccagggttcctagatgtgagggcagcccctttgttggctgatgacaacaaattacgtggcttacccctgacctatgtcatcacctgtcaatatgatctcttaagagatgatggactcatgtatgtcacccgacttcgcaacactggggttcaggtgactcataaccatgttgaggatggattccatggagcattttcatttctgggacttaaaattagtcacagacttataaatcagtatattgagtggctaaaggaaaatctatagtaaaacatgtagctataacatattttaaaaataaaatctgaaaacctcagaaaatttgcattagaaattggtctttcttaaaatggtctagttaagttccacatgtagcataattcttaaataggcacttttctgttttttttttcttactgtgggatttcatttcaattttctacattgtctatctgctttttctgagattttccttcttacactgttaatcttattttaaaaaatattacattcttgtatactttatttttgtgagttggctactatttacgatgcaagagaataaatgtgagcaaatattgccgaa

SEQ ID NO: 73 - DNA, 860 bp, Homo sapiens
  misc feature (3): n equals a,t,g, or c
  misc feature (13): n equals a,t,g, or c
  misc feature (40): n equals a,t,g, or c
  misc feature (802): n equals a,t,g, or c
  misc feature (812): n equals a,t,g, or c
  misc feature (843): n equals a,t,g, or c
  misc feature (857): n equals a,t,g, or c
aangtacgcctgncaggtaccggtccggaattccggggtngacccacgcgtccggtttgggaccagatggattgtagggagtagggtacaatacagtctgktctcctccagctccttctttctgcaacatggggaagaacaaactccttcatccaagtctggttcttctcctcttggtcctcctgcccacagacgcctcagtctctggaaaaccgcagtatatggttctggtcccctccctgctccacactgagaccactgagaagggctgtgtccttctgagctacctgaatgagacagtgactgtaagtgcttccttggagtctgtcaggggaaacaggagcctcttcactgacctggaggcggagaatgacgtactccactgtgtcgccttcgctgtcccaaagtcttcatccaatgaggaggtaatgttcctcactgtccaagtgaaaggaccaacccaagaatttaagaagcggaccacagtgatggttaagaacgaggacagtctggtctttgtccagacagacaaatcaatctacaaaccagggcagacagtgaaatttcgtgttgtctccatggatgaaaactttcaccccctgaatgagttgattccactagtatacattcaggatcccaaaggaaatcgcatcgcacaatggcagagtttccagttagagggtggcctcaagcaattttcttttcccctctcatcagagcccttccagggctccttacaaggtggtggtacagaagaaatcaggtgggaagggacagagcacccttttcaccgtgggagganttgttgcttncccaagtttggaagttacaagttaacagtgnccaaaggtaatcancat

SEQ ID NO: 74 - DNA, 520 bp, Homo sapiens
  misc feature (34): n equals a,t,g, or c
  misc feature (485): n equals a,t,g, or c
  misc feature (498): n equals a,t,g, or c
gggcatcactggtctcgcgtgcgcgtgaccaggncccggtttccggtgccaggacctttccgaagcgtcgagtggcctaacggtcacagctgtcgcccatcggagaggcaggactactgcgagcagttttaccgcgacctccggagccggcgtgacaggctctgtcaytaaaataggtctgtccagtcgtactttttcctcaccttgaactttccgtcacgggaatacacgatttggcttargggccggggctctcctgaggagaragggtttgctttgcggggaagagcgagtcttgacttcgcagcctccaatttcagccgcggtgtggaggggggtgctttgggtggtccccacagcctttccggagtgcccgcgcgtgtgagcttttgagatttgacaatttgtgaagtgcttggtgctgactttcggggacgacaggatccttttacagtcattctcctgtcagggaagcaagtggggancgaggaagatcanaatcgtaacagacttgagttaa

SEQ ID NO: 75 - DNA, 863 bp, Homo sapiens
  misc feature (2): n equals a,t,g, or c
  misc feature (6): n equals a,t,g, or c
  misc feature (772): n equals a,t,g, or c
gnccgnaagcagcagcgcaggttgtaccccgtttcccctcccccttcccttctccggttgccttcccgggccccttacactccacagtcccggtcccgccatgtcccagaaacaagaagaagagaaccctgcggaggagaccggcgaggagaagcaggacacgcagagaaagaaggtattctgcctgagagagctgaagaggcaaagctaaaggccaaatacccaagcctaggacaaaagcctggaggctccgacttcctcatgaagagactccagaaagggcaaaagtactttgactcaggagactacaacatggccaaagccaagatgaagaataagcagctgccaagtgcaggaccagacaagaacctggtgactggtgatcacatccccaccccacaggatctgccccagagaaagtcctcgctcgtcaccagcaagcttgcggggtaacctgagcccccctctcctccccttcctcaaccactggacgtttatatattataggcagggatgaaatgggcacctagtcagatcttctcagcttgctagccagaaatgactgtgattctgctgggggctgctgagaaggtaatgtaggttgaaaaggggctctaagtttatttatttcgttagattgacacttccacacactccctgtagtccaggtagggcccagaaataggaaaggctaggattggataatgctgcaaatgctttttttgtgtgagaaactgggagagatgtgatttctcctttggggagagaattntcccaaatttgatttagggtgagccttgggaatagttttggcaggttttaacatcccaagggttaacctaacgtagtttgggaaaaggtag

SEQ ID NO: 76 - DNA, 691 bp, Homo sapiens
  misc feature (674): n equals a,t,g, or c
  misc feature (681): n equals a,t,g, or c
aagaaaagaagatgtagcctcttttccagaataagagtactgactaagctgcctgaaagcttgtcactgattctttgcttcaggagtctcagctagggagttgaagtgtttacatcagactgtcttgtgcaattcttatatttattttactggttcacttttttttacatttattttagtctttatatttttatttttaagcattgatgtacttagttgttgaaagggtgatgaaactgatatccagatacttgagatcctggtaattggtcataaataattggcaaaataacaaattgtgaaaatagaagccattgctcagcaccgtttctccatcaatgccgtgaacttgccttacttgaggaaaaattctttaactttggaatattgcattgaactcagctatacacataaaacattttctttggtaaatcaagatccagtcagggtttctcttgaattattttggaacaatgccaggatccaaactgattaagttacagtttaagcacccttcagtattaatatatacggtattatataacaggtcaacaagtgctctttgatgataaaacttgtaatagagcaataattgtaaatggttaccatactgtaagatattttgataaaaattaactagtaatacttgtatttatttgaaacactgggggggngggagtngggggggggg

SEQ ID NO: 77 - DNA, 325 bp, Homo sapiens
  misc feature (310): n equals a,t,g, or c
cccacgcgtccgggcggccaccgcgctgctggaggccggcctggcgcgggtgctcttctacccgacgctgctctacaccctgttccgcgggaaggtgccgggtcgggcgcaccgggactggtaccaccgcatcgaccccaccgtgctgctgggcgcgctgccgttgcggakttgacgcgccactggtacaggacgagaacgtgcgcggggtgatcaccatgaacgargartacgagacgargttcctgtgcaaytyttcacaggtgcacaaatggaatccagaagaagctgtaagaccatcgccaagatncggtcatacatccaa

SEQ ID NO: 78 - DNA, 821 bp, Homo sapiens
  misc feature (45): n equals a,t,g, or c
  misc feature (54): n equals a,t,g, or c
  misc feature (690): n equals a,t,g, or c
  misc feature (771): n equals a,t,g, or c
acttagttctagatcgcgatctagaactacccacgcgtccgcggnacgctgggnctctgtgaattctgaatgttaaaaaccaacactgcttttaatcctcttttaatgttttaatacragctttgtgttctgaaacaaggctgcataagtagaatgggaatccttctaaaggtgggtgtgaactcaccacaagctgagctttatagagcccttgagaaaccctcctgagcactaagcagttggggtgctgattttcttgtacttttgaaaaattaagtcactcccagtttcctgcataagttcttgaacagaatgaaatcacatctccattcaaaaaatgtctcaagcatctactgttgtgtaaggaacttctgattctgattgctgttacttgaataggaaatggttactcattctgtataaaagttttgcaagagaatgaattttttattctgtaatcaaaaagcaataacttgaaattcactctgtaatattataggkcagaattatacaagttttaccaaattgttacacttattctccaagctgccagaacctggtatctgtatctgtaaaaccaaattaacttttgcttaaatgggaagtatacatatatctgtatagatacattacccctttacatgtttaacatacacacacttaaacacataaatactagtgtgattatantttggagtttgcaatatagcataaaggacaagtagaactgcacattaagattcctaccgaagccactagatgtggctgggnacaatcaaggaggaatttgtccacaggaaggtgaggaattccaatgagcc

SEQ ID NO: 79 - DNA, 617 bp, Homo sapiens
  misc feature (538): n equals a,t,g, or c
  misc feature (595): n equals a,t,g, or c
tagagcatgagctcaggcaagagtgcccgctacaaccgcttctccggggggcccagcaatcttcccaccccagacgtcaccacagggaccagaatggaaacgaccttcggacccgccttttcagccgtcaccaccatcacaaaagctgacgggaccagcacctacaagcagcactgcaggacaccctcctcctcsagcacccttgcctactccccgcgggacgaggaggacagcatgccccccatcagcactccccgccgctccgactccgccatctctgtccgctccctgcactcagagtccagcatgtctctgcgctccacattctcactgcccgaggaggaggaggagccggagccactggtgtttgcggasagccctcggtgaagctgtgctgtcagctctgctgcagcgtcttcaaagaccccgtgatcaccacgtstsggcacacgttctgtaggagatgcgccttgaagtcagagaagtgtyccgtggacaacgtcaaactgaccgtggtggtgaacaacatcgcggtggncgagcagatcggggagctcttcatccactgccggcagtgccgggtaacgggcaagcnggaaagcccccatctttgaagt

SEQ ID NO: 80 - DNA, 1189 bp, Homo sapiens
  misc feature (1107): n equals a,t,g, or c
  misc feature (1156): n equals a,t,g, or c
  misc feature (1167): n equals a,t,g, or c
  misc feature (1188): n equals a,t,g, or c
gtactttctaaaattgcagaaaagcagaacatattccttgctgtttataatattatagtcgtatcaaagggaaagagtatttctccttaaataaaattacaaataagaaatgtatgttttactcttactcataaaaggtattgtagaatacaaaaggtttttcaaactggttttgtctttgattggcttttataatccacacttcaaagaagaaatgcatttaacttttaataacttagtcaaaaagtataatgttgccttgccttgcataacctttaactattgcaaatgatgttttgtccttcccctttgtccagtattttccaaatggtcaacagtttaaacatttaagcttgcactgagaaaccttgccacatttcagcagttttgttttgcttttggtggagagcacctgatctcgactttacagccaatgtatttactctaaattacacttttatagatacaaggtaaagtgtagctgggtgaaggcactcaggagccataaaatgtggtcaaccacaataaattaaaatgtaagctaaacaaagtattcacacttgcatttttttaataaggaatttaagatccatagtatctttaatgcttggaagagacacaaattcaaggtgataaaaatattaattagaagacacataacatgcctcaagtatatcaacacttgactccacaaacaaggcataaccatgaaaacaacactccctttattttgggctcccaaaatcaaaagttagaactaatttatttaatcacagatatttagtatactcaataatgcactaacaatttctttaaaaaaacactaatactgtacagtatttctgtgttttagtttttcccacagctgttgaaaatttcagccttgatttgaaacatgacctgcatgacaggctataagttgtcaatagttctttttctttggaaaagtacagttgtggcatttactcactttagcagatagctaaaagggaaaaataaggaaaaatatacactggacctgcagttaagtttttcgacaatgccaaggatcaaaaacagatggaaaacaacatttggctgaagatgaaaaggtattggcattggtcntaatagatgttgccatctctggggtgaggatgctgactgagcctgttcngtgtcttcatncacccccatttgttttcttcnt

SEQ ID NO: 81 - DNA, 466 bp, Homo sapiens
gcggcggcggcgcgggcctgcagggcctgccgggcgcacgtggcggcctcgggcctgggagccgggccgcgtcctctctcctcggccgcgcggccaccggcgaagttctaggggcggggggctcgccccgcgcaggagtcaccccaactttcacggctccaaaaaatacttcccgagttgggggagggggccaccgagccacgagcaggagtggcttttgtccctcatccttgtttactcggagaaacttcagaccggacgtgtttagtcagaacagaaatacatctcagggccaaaccgataggaaacgaggctgcctcgcggtggcaccgcaccycccaaccgggttccgagcaccggagctggctgctgctccctctttggagcaaagttttatgcaaagagggtgttttttgaaactttcggtgcacggtgatttttttttttaaggtcccataattaggaa

SEQ ID NO: 82 - DNA, 360 bp, Homo sapiens
atctgggaatcaagtaggtttttggtctgtgcttttataagtatttcttctatgtgaaatcactctaagtttgaatagtagaatttcttatcttttgaccaagatgtgttacataaacttgggttagcataaaaaaacaaaaattttttaaaccctcatgtgtcttaaagataatagtagactagaaatattaagagctgaaccaagagttttaatgtatggtaatttgaaataattttaatttactggataattttattttaccagtatattacaagttgagttgrctggaagggtagtttccaaccccaagctggtaataccagttccaaggggccaccattaacagcttgggccctt

SEQ ID NO: 83 - DNA, 2109 bp, Homo sapiens
  misc feature (2066): n equals a,t,g, or c
  misc feature (2083): n equals a,t,g, or c
agatgtctttgggtgggggaacctcacctgcccaatctgcaaaggtctattcaccgccatcaacctcgggctgaagaaggaacccaatgtggctcgcgtgggctccgtggccatcaagctgtgcaatctgctgaagatagcaccacctgccgtgtgccaatccattgtccacctctttgaggatgacatggtggaggtgtggagacgctcagtgctgagcccatctgaggcctgtggctgctcctgggctccactgtgggcactgggacattttctcatcttggaacatctctttgcctactgtgccgaagccgccccccaaaccccctagccccccagccccaggtgcccctgtcagccgcatcctcttcctcactgacctgcactgggatcatgactacctggagggcacggaccctgactgtgcagacccactgtgctgccgccggggttctggcctgccgcccgcatcccggccaggtgccggatactggggcgaatacagcaagtgtgacctgcccctgaggaccctggagagcctgttgagtgggctgggcccagccggcccttttgatatggtgtactggacaggagacatccccgcacatgatgtctggcaccagactcgtcaggaccaactgcgggccctgaccaccgtcacagcacttgtgaggaagttcctggggccagtgccagtgtaccctgctgtgggtaaccatgaaagcacacctgtcaatagcttccctccccccttcattgagggcaaccactcctcccgctggctctatgaagcgatggccaaggcttgggagccctggctgcctgccgaagccctgcgcaccctcagaattggggggttctatgctctttccccataccccggtctccgcctcatctctctcaatatgaatttttgttcccgtgagaacttctggctcttgatcaactccacggatcccgcagacagctccagtggctggtgggggagcttcaggctgctgaggatcgaggagacaaagtgcatataattggccacattcccccagggcactgtctgaagagctggagctggaattattaccgaattgtagccaggtatgagaacaccctggctgctcagttctttggccacactcatgtggatgaatttgaggtcttctatgatgaagagactctgagccggccgctggctgtagccttcctggcacccagtgcaactacctacatcggccttaatcctggttaccgtgtgtaccaaatagatggaaactactccgggagctctcacgtggtcctggaccatgagacctacatcctgaatctgacccaggcaaacataccgggagccataccgcactggcagcttctctacagggctcgagaaacctatgggctgcccaacacactgcctaccgcctggcacaacctggtatatcgcatgcggggcgacatgcaacttttccagaccttctggtttctctaccataagggccacccaccctcggagccctgtggcacgccctgccgtctggctactctttgtgcccagctctctgcccgtgctgacagccctgctctgtgccgccacctgatgccagatgggagcctcccagaggcccagagcctgtggccaaggccactgttttgctagggccccagggcccacatttgggaaagttcttgatgtaggaaagggtgaaaaagcccaaatgctgctgtggttcaaccaggcaagatcatccggtgaaagaaccagtccctgggccccaaggatgccggggaaacaggaccttctcctttcctggagctggtttagctggatatgggagggggtttggctgcctgtgcccaggagctagactgccttgaggctgctgtcctttcacagccatggagtagaggcctaagttgacactgccctgggcagacaagacaggagctgtcgccccaggcctgtgctgcccagccaggaaccctgtactgctgctgcgacctgatgctgccagtctgttaaaataaagataagagacttggactccaraaaaaaaaaaaaaaaaaagggcggncgttcttagaggatccntcgagggggcccaagtttaagctggc

SEQ ID NO: 84 - DNA, 1535 bp, Homo sapiens
cttcatgttagtcttagagaaacaggaaaaatactgatggtcaccagcagttcttcgcaatcgtacagctgataggaacacgcaagcaagctgaaaattttgcttaccgacttgagctaaatggtcataggcgacgattgacttgggaagcgactcctcgatctattcatgaaggaattgcaacagccattatgaatagcgactgtctagtctttgacaccagcattgcacagctttttgcagaaaatggcaatttaggcatcaatgtaactatttccatgtgttgaaatggcaatcaaacattttctggccagtgtttaaaacttcagtttcacagaaaataaggcacccatctgtctgccaacctaaaactctttcggtaggtggaagctagacacatgaaggtaaataaaaagaaaggctgttaaatacaggaaacagttgcatgtagtaacactaatatatttaaaaataagtcaacagtaaaccactgaaaaaatatatgtatatacacccaagatgggcatcttttgtattaagaaaggaagcattgtaaaataattctgagttttgtgtttgttgtagattgattgtattgttgaaaaagtttgtttttgcgtgggagtgtgtgcctgcgtgggtgtgtgcgtgtttgggtttttttcctttaactgacaagccatcttgagtggtcatgggccactgcttttccctttgtgagtcaatacatagtgctgctgtgtgctttttttgtgtgtatttgctaatttttattaattttagtttttcattaaataaatttgacttttctgtaattcaggtttttcctttttttgtaccattttaaagttagtatcttttgatatgcatatttgtttatggtaaaaaatttataacgtgttcaatattttcttttcccccattaatcagttcattagaaatattttaaaatcagctattttgtgaagccatgagttccagaaagtaaaggtgacatcggaaaaataatcaaaagctatttaaagcatctataaggtgctctctttctgtcttctacagatgagtcacacctttgagcttaatctttgaaaggttagagaataaattgatttttataaatactgcaaatcaggcttttgtttcctttttcagatatcttggacaaatcacatattttaaaatttgttcttgtatttattggttttgcagaagaaggcatcgtcatgcacagtatttgtaattaaaagcaaatcatttgtttaaaaaggcagtttgcaaaaaatgtttttggtcttttataattctcattaaaagaatatctggcaaattaaaaaaatcttactgtgtctgctttagtctaagtttgataaaatccgawgttattttcctgtttcattccatactttaattatatagcagaaagctgtgtgttgtcatttttaagtgcggkagacttaactctaaatcacagscaaatactggggkatagggccyctgggaattggtctttyccccatgccctgccccttcttgcc

SEQ ID NO: 85 - DNA, 431 bp, Homo sapiens
  misc feature (325): n equals a,t,g, or c
  misc feature (334): n equals a,t,g, or c
  misc feature (347): n equals a,t,g, or c
  misc feature (381): n equals a,t,g, or c
cggggatccaagcagccccggggagagggaggctgcgtctgtatccgggcccaaggtcaccgcgcgaccggcagatgcgtgctgcaggccccggccacatgagcagcgctacggacgcgactgmcccggccttggatatgccagatcgagtgtccacccgtccgtgggactggtcgcctgactcggcctgccccagsctstgcttcaccccactggtggccaaatagccgatgtctaatcccccacacaagctcatccccggcctctggcgattgttgggaattctctccctaattcacgcctgaaggtcatggagagttgctanaactgggantgccctgggaagngcaaaaaaccaagccgggttgcagcaagactttnccagtcctgtttttttggtcgtgattcggccggaacatgcaggtgatagt

SEQ ID NO: 86 - DNA, 1142 bp, Homo sapiens
  misc feature (478): n equals a,t,g, or c
  misc feature (565): n equals a,t,g, or c
tttttcctgaaaaagaggaagtggcccttaaaaggctggcataagagattcttctatctggacaaaggaatcttgaaatatgccaagagccaaaccgatatagagagagagaagctgcatggctgcattgatgtcgggctctcagtgatgtctgtaaagaagtcatcaaaatgsatagaccttgacaccgaggagcacatctaccatctgaaggtcaagtcagaagaagtctttgatgagtgggtatcgaaacttcgccaccacagaatgtatcgtcagaatgaaattgccatgtttccacatgaagttaaccactttttctcagggtccaccatcacagactcttcatctggggtgtttgactccatttcaagtaggaagcgtacagttatatcaaagcagaatttatttcaaactgggaagcaatgtatcattttcttgtggtggtgagacacgagttccattatggttacagtcnttcagaggacatggaaaaatgctccaaagacctggcgcactgtcatgcctacctggtagaaatgagccagctcctgcaaagcatggnacgtcctgcatcggacatactcgggcaccagctatcaacgccatccaggtcccgaaacctttttctggcccagtaagactacactcctccaatcctaatttgtcaacactagattttggagaagagaaaaattattctgatggctctgaaacctcatcagagttttctaaaatgcaagaagatctgtgtcatattgcccataaagtttacttcactttaaggtcagcttttaatatcatgtcagcggagagagagaaactgaagcagctgatggagcaggatgcctcctcctccccgtctgctcaggtcattggtctgaagaacgccctgtcatccgccctagcacaaaacacagatcttaaagaacgcttacgcagaatccatgccgagtctctgctcctcgactcccccgctgtcgccaagtcgggtgacaatctgggcagaggaaaactccagagatgaaaaccgagctctagttcatcagctttctaatgaaagtaggactctccatcactgactccctttctgagttttttgatgctcaggaagttctgttatctccaagstyttcaggaaa

SEQ ID NO: 87 - DNA, 1797 bp, Homo sapiens
  misc feature (645): n equals a,t,g, or c
  misc feature (1793): n equals a,t,g, or c
  misc feature (1794): n equals a,t,g, or c
  misc feature (1796): n equals a,t,g, or c
tcgacccacgcgtccgggagaacgcacgcctcttccacccgaagctgatcatcgcaggaaccagctgctactcccgaaacctggaatatgcccggctacggaagattgcagatgagaacggggcgtatctcatggcggacatggctcacatcagcgggctggtggcggctggcgtggtgccctccccatttgaacactgccatgtggtgaccaccaccactcacaagaccctgcgaggctgccgagctggcatgatcttctacaggaaaggagtgaaaagtgtggatcccaagactggcaaagagattctgtacaacctggagtctcttatcaattctgctgtgttccctggcctgcagggaggtccccacaaccacgccattgctggggttgctgtggcactgaagcaagctatgactctggaatttaaagtttatcaacaccaggtggtggccaactgcagggctctgtctgaggccctgacggagctgggctacaaaatagtcacaggtggttctgacaaccatttgatccttgtggatctccgttccaaaggcacagatggtggaagggctgagaaggtgctagaagcctgttctattgcctgcaacaagaacacctgtccaggtgacagaagcgctctgnggcccagtggactgcggctggggaccccagcactgacgtcccgtggacttttggaaaaagacttccaaaaagtagcccactttattcacagagggatagagctgaccctgcagatccagagcgacactggtgtcagagccaccctgaaagagttcaaggagagactggcaggggataagtaccaggcggccgtgcaggctctccgggaggaggttgagagcttcgcctctytcttccctctgcctggcctgcctgacttctaaaggagcgggcccactctggacccacctggcgccacagaggaagctgsctgccggaggacccccacytgagagatggatgagctgctccaaaggggaactgttgacactcgggccctttgagggggtttcttttggacttttttcatgttttcttcacaaatcaaaatttgtttaagtctcattgttagtaattctgggacaggttattaaaggatttaaatttgaacctggctttctcacagctggacataattctaggaaaataaaatactatgtcgccacttggtcataatcatttagatggtggtgtagggcaaagctgttagaaagattgtagcgttttactctccctgggctttcctccgccttgctgcaacagagaggaaatgcccatgtccacagcttgtacacactgccccctcactatcttgttatccagtggcatgccaaaggagaactgaattagcttctgaggcttctgctgtaaatcagaagtgtatgttagtcaagagtaaacaagatgcacccagtatggtgggagggttttgctgtcagtagctcaaagtatggtgtagaaatggcctcctccctccatcctgggaagtcccagtcccatcctggtgtgagaatcaaccaggctttcctgctccacctgagataaccaactccctcccgtaatcaggaagccaaatgtcaccttcccaaagaaattttattttcacgtagctgaagtgcaaaacatagatgaccatttttaataagcacaatcaaatttttaaccacagaatgtctacaagaattatagctttaaaaaatacaaccaatttttatatttcaaaaatatttgaactcaaataaattaatttcttaaaaagtaaaaaaaannang

SEQ ID NO: 88 - DNA, 381 bp, Homo sapiens
ccgaattcggcacgagggcggcggarggtgtgaccckkctgcaccttgctctgtcccacctgcctctgggtgcccggcagctccactagatttttggattcattsctttgaagggagtcgggttcacccttccatcgtattctcccaactacacattgtaaagcctgagaaacttctagaacctcaggaagctgcagctggagggctggggcacctgcccccctgctccccacacatcatatcctccccatactcctgcagggcccacggctcctgagcaacagctgggacamccggccttggcggstgcamcccctgctaggctctgccmaccggccaccaacactcctgtaattccaataaagcagtttattttctgag

SEQ ID NO: 89 - DNA, 538 bp, Homo sapiens
  misc feature (24): n equals a,t,g, or c
  misc feature (53): n equals a,t,g, or c
gcccaaggattccggcacgagganttkttgttggttgggggccttttggcsgntgacggagactgcccaggtgtggtcaccatgttcctctccgcggtcttctttgccaagagcaagtcaaaaaacattctggtgagaatggtgagcgaagctgggacaggtttctgcttcaacaccaagagaaaccgactgcgggaaaaactgactcttttgcattatgatccagttgtgaaacaaagagtcctcttcgtggaaaagaaaaaaatacgctccctttaaacggtggattgaaaatgactttgatttataaagagaagactgagggcggggatactgattcagaaatcctgtagcgtgtaataaaagaagaggaaatggcatggaatcactgcctcctgtgatttgaaggccattgtgaaggaaaacaatgcagtgaaagaaagttcttcatattaggacagatatcattgcatcacatttatttatctttctgggtatttttatagcccttaataaaaaatattaaaatwgwaaaaaa

SEQ ID NO: 90 - DNA, 2121 bp, Homo sapiens
ggcagaggctttaagaagaacctatttgagatggcgattaaccttgccaagagccagcatctggacagtgatgggctggcccagattttcatgcagtatggagaccatctctacagcaagggcaaccacgatggggctgtccagcaatatatccgaaccattggaaagttggagccatcctacgtgatccgcaagtttctggatgcccagcgcattcacaacctgactgcctacctgcagaccctgcaccgacaatccctggccaatgccgaccataccaccctgctcctcaactgctataccaagctcaaggacagctcgaagctggaggagttcatcaagaaaaagagtgagagtgaagtccactttgatgtggagacagccatcaaggtcctccggcaggctggctactactcccatgccctgtatctggcggagaaccatgcacatcatgagtggtacctgaagatccagctagaagacattaagaattatcaggaagcccttcgatacatcggcaagctgccttttgagcaggcagagagcaacatgaagcgctacggcaagatcctcatgcaccacwtaccagagcagacaactcagttgctgaagggactttgtactgattatcggcccagcctcgaaggccgcagcgatagggaggccccaggctgcagggccaactctgaggagttcatccccatctttgccaataacccgcgagagctgaaagccttcctagagcacatgagtraagtgcagccagactcaccccaggggatctacgacacactccttgagctgcgactgcagaactgggcccacgagaaggatccacaggtcaaagagaagcttcacgcagaggccatttccctgctgaagagtggtcgcttctgtgacgtctttgacaaggccctggtcctgtgccagatgcacgacttccaggatggtgtcctttacctttatgagcaggggaagctgttccagcagatcatgcactaccacatgcagcacgagcagtaccggcagtcatcagcgtgtgtgagcgccatggggagcaggacccctccttgtgggagcaggccctcagctacttcgctcgcaaggaggaggactgcaaggagtatgtggcagctgtcctcaagcatatcgagaacaagaacctcatgccacctcttctagtggtgcagaccctggcccacaactccacagccacactctccgtcatcagggactacctggtccaaaaactacagaaacagagccagcagattgcacaggatgagctgcgggtgcggcggtaccgagaggagaccacccgtatccgccaggagatccaagagctcaaggccagtcctaagattttccaaaagaccaagtgcagcatctgtaacagtgccttggagttgccctcagtccacttcctgtgtggccactccttccaccaacactgctttgagagttactcggaaagtgatgctgactgccccacctgcctccctgaaaaccggaagtcatggatatgatccgggcccaggaacagaaacgagatctccatgatcaattccagcatcagctcargtgctccaatgacagcttttctgtgattgctgactactttggcagaggtgttttcaacaaattgactctgctgaccgaccctcccacagccagactgacctccagcctggaggctgggctgcaacgcgacctactcatgcactccaggaggggcacttaagcagcctggaggaagatgtgggcaacagtggaggaccragagaacagacacaatgggacctgggcgggcgttacacagaaggctggctgacatgcccagggctccactctcatctaatgtcacagccctcagaactaaagcggactttctttccctgccttcttatttagtcagcttgccatccctcctcttcactagcagtgtagatcattccagatcagtgggggagggcacctcagcaacctctgagtgtggacaatagctgctttcttctctatccaagagcaccaggctgtgcttgggtccttgctctcagagtctataaataaaagaatataatgattaaaaaaaaaaaaaaaaaaaaaaaaaaaaaaaaaaag

SEQ ID NO: 91 - DNA, 2974 bp, Homo sapiens
  misc feature (2833): n equals a,t,g, or c
  misc feature (2862): n equals a,t,g, or c
  misc feature (2938): n equals a,t,g, or c
  misc feature (2942): n equals a,t,g, or c
  misc feature (2949): n equals a,t,g, or c
ggcacgagcggaggggctcggctgcaccggggggatcgcgcctggcagaccccagaccgagcagaggcgacccagcgcgctcgggagaggctgcaccgccgcgcccccgcctagcccttccggatcctgcgcgcagaaaagtttcatttgctgtatgccatcctcgagagctgtctaggttaacgttcgcactctgtgtatataacctcgacagtcttggcacctaacgtgctgtgcgtactgctcctttggttgaatccccaggcccttgttggggcacaaggtggcaggatgtctcagtggtacgaacttcagcagcttgactcaaaattcctggagcaggttcaccagctttatgatgacagttttcccatggaaatcagacagtacctggcacagtggttagaaaagcaagactgggagcacgctgccaatgatgtttcatttgccaccatccgttttcatgacctcctgtcacagctggatgatcaatatagtcgcttttctttggagaataacttcttgctacagcataacataaggaaaagcaagcgtaatcttcaggataattttcaggaagacccaatccagatgtctatgatcatttacagctgtctgaaggaagaaaggaaaattctggaaaacgcccagagatttaatcaggctcagtcggggaatattcagagcacagtgatgttagacaaacagaaagagcttgacagtaaagtcagaaatgtgaaggacaaggttatgtgtatagagcatgaaatcaagagcctggaagatttacaagatgaatatgacttcaaatgcaaaaccttgcagaacagagaacacgagaccaatggtgtggcaaagagtgatcagaaacaagaacagctgttactcaagaagatgtatttaatgcttgacaataagagaaaggaagtagttcacaaaataatagagttgctgaatgtcactgaacttacccagaatgccctgattaatgatgaactagtggagtggaagcggagacagcagagcgcctgtattggggggccgcccaatgcttgcttggatcagctgcagaactggttcactatagttgcggagagtctgcagcaagttcggcagcagcttaaaaagttggaggaattggaacagaaatacacctacgaacatgaccctatcacaaaaaacaaacaagtgttatgggaccgcaccttcagtcttttccagcagctcattcagagctcgtttgtggtggaaagacagccctgcatgccaacgcaccctcagaggccgctggtcttgaagacaggggtccagttcactgtgaagttgagactgttggtgaaattgcaagagctgaattataatttgaaagtcaaagtcttatttgataaagatgtgaatgagagaaatacagtaaaaggatttaggaagttcaacattttgggcacgcacacaaaagtgatgaacatggaggagtccaccaatggcagtctggcggctgaatttcggcacctgcaattgaaagaacagaaaaatgctggcaccagaacgaatgagggtcctctcatcgttactgaagagcttcactcccttagttttgaaacccaattgtgccagcctggtttggtaattgacctcgagacgacctctctgcccgttgtggtgatctccaacgtcagccagctcccgagcggttgggcctccatcctttggtacaacatgctggtggcggaacccaggaatctgtccttcttcctgactccaccatgtgcacgatgggctcagctttcagaagtgctgagttggcagttttcttctgtcaccaaaagaggtctcaatgtggaccagctgaacatgttgggagagaagcttcttggtcctaacgccagccccgatggtctcattccgtggacgaggttttgtaaggaaaatataaatgataaaaattttcccttctggctttggattgaaagcatcctagaactcattaaaaaacacctgctccctctctggaatgatgggtgcatcatgggcttcatcagcaaggagcgagagcgtgccctgttgaaggaccagcagccggggaccttcctgctgcggttcagtgagagctcccgggaaggggccatcacattcacatgggtggagcggtcccagaacggaggcgaacctgacttccatgcggttgaaccctacacgaagaaagaactttctgctgttactttccctgacatcattcgcaattacaaagtcatggctgctgagaatattcctgagaatcccctgaagtatctgtatccaaatattgacaaagaccatgcctttggaaagtattactccaggccaaaggaagcaccagagccaatggaacttgatggccctaaaggaactggatatatcaagactgagttgatttctgtgtctgaagttcacccttctagacttcagaccacagacaacctgctccccatgtctcctgaggagtttgacgaggtgtctcggatagtgggctctgtagaattcgacagtatgatgaacacagtatagagcatgaatttttttcatcttctctggcgacagttttccttctcatctgtgattccctcctgctactctgttccttcacatcctgtgtttctagggaaatgaaagaaaggccagcaaattcgctgcaacctgttgatagcaagtgaatttttctctaactcagaaacatcagttactctgaagggcatcatgcatcttactgaaggtaaaattgaaaggcattctctgaagagtgggtttcacaagtgaaaaacatccagatacacccaaagtatcaggacgagaatgnagggtcctttgggaaaggrgaagttagcnacattrgmaatgttawgcataaagtcagtgcccactgktatarggtgttggtaaatcagtggktwttagggactgncttnaccgtanggaccggtaaatttctggtggggag

SEQ ID NO: 92 - DNA, 412 bp, Homo sapiens
  misc feature (136): n equals a,t,g, or c
  misc feature (229): n equals a,t,g, or c
  misc feature (349): n equals a,t,g, or c
  misc feature (371): n equals a,t,g, or c
  misc feature (383): n equals a,t,g, or c
  misc feature (404): n equals a,t,g, or c
ggcacgagcctccgcgagtcccagcgctccctctggggagtgcggttgaggggctgtcctcgcacggagcctcgctcggcctcgggggagccacgagaggtgggagttggacccgcagcgggccaggagccctgtncattggaggacccgccaaaaaggaagcaaaccctctttttctttatccaaccccaaatagctagggcctagggggaagactcacatatcgatnaaatggtttgttgcccgttttattctctgggaaatacaactgrtcttaccaaaggaaattaacctgtctttttggccgtgtttaatttaggaggccataggattacctgttttcagaggntggaaggggacctggaggcccntggttaatcccnttaacctcgtggaggaaagcnggaaaaaa

SEQ ID NO: 93 - DNA, 1883 bp, Homo sapiens
  misc feature (8): n equals a,t,g, or c
  misc feature (252): n equals a,t,g, or c
  misc feature (1591): n equals a,t,g, or c
  misc feature (1819): n equals a,t,g, or c
  misc feature (1883): n equals a,t,g, or c
ccgtgccntcaccccagagcagctgcagcctcagccggccgcccctccgccagccaagtccgccgctctgacccccggcagcaagtcgccaccatggtgaagatcgtgacagttaagacccaggcgtaccaggaccagaagccgggcacgagcgggctgcggaacggggtgaaggtgttccagagcagcgccaactacgcggagaacttcatccagagtatcatctccaccgtggagccggcgcagscakgnaggccacgctggtggtgggcggggacggccggttctacatgaaggaggccatccagctcatcgctcgcatcgctgccgccaacgggatcggtcgcttggttatcggacagaatggaatcctctccacccctgctgtatcctgcatcattagaaaaatcaaagccattggtgggatcattctgacagccagtcacaacccagggggccccaatggagattttggaatcaaattcaatatttctaatggaggtcctgctccagaagcaataactgataaaattttccaaatcagcaagacaattgaagaatatgcagtttgccctgacctgaaagtagaccttggtgttctgggaaagcagcagtttgacttggaaaataagttcaaacccttcacagtggaaattgtggattcggtagaagcttatgctacaatgctgagaagcatctttgatttcagtgcactgaaagaactactttctgggccaaaccgactgaagatccgtattgatgctatgcatggagttgtgggaccgtatgtaaagaagatcctctgtgaagaactcggtgcccctgcgaactcggcagttaactgcgttcctctggaggactttggaggccaccaccctgaccccaacctcacctatgcagctgacctggtggagaccatgaagtcaggagagcatgattttggggctgcctttgatggagatggggatcgaaacatgattctgggcaagcatgggttctttgtgaacccttcagactctgtggctgtcattgctgccaacatcttcagcattccgtatttccagcagactggggtccgcggctttgcacggagcatgcccacgagtggtgctctggaccgggtggctagtgctacaaagattgctttgtatgagaccccaactggctggaagttttttgggaatttgatggacgcgagcaaactgtccctttgtggggaggagagcttcgggaccggttctgaccacatccgtgagaaagatggactgtgggctgtccttgcctggctctccatcctagccacccgcaagcagagtgtggaggacattctcaaagatcattggcaaaagyatggccggaatttcttcaccaggtatgattacgaggaggtggaagctgagggcgcaaacaaaatgatgaaggacttggaggccctgatgtttgatcgctcctttgtggggaagcagttctcagcaaatgacaaagtttacactgtggagaaggccgataactttgaatacagcgacccagtggatggaagcmtttcaagaaatcagggcttgcgcctcattttcacagatggttctcgaantcgtcttccgactgagcggcactgggagtgcggagrccaccattcggctgtacatcgatagstatgagaaggacgttgccaagattaaccaaggacccccaaggtcaatgttggccccccttaatttccattgctctgaaagtgtcccagctgcaggagaggacgggacgcacttgcacccactgtcatcacctaagaagacaggcctgatgtggtacgtccctccanccccggacccatccaagtcatctgattgaagagcatgacagaaacaaaatgtattcaccaaagn

SEQ ID NO: 94 - DNA, 2311 bp, Homo sapiens
  misc feature (7): n equals a,t,g, or c
  misc feature (689): n equals a,t,g, or c
  misc feature (1657): n equals a,t,g, or c
  misc feature (2311): n equals a,t,g, or c
ccgcagnactgcacaactctgccaggggtgaggttcttggcctcagctcctccctggggaaggaactagtctttctccaagaagaactcgacttgtctgaaatccacattccagaggctcaggaagtggaaatggcctcaggtcattttgccttccyacatgtgcctgttccagatggcagggctccttactgcaaggcatctctcagcgcctccagcagcctggaacccacgcctcctgaggacacagccatcagcagcttgcgccctccctctgctcctgagatgctgacccagcatggagcccaagagcagctcgaagaccatcctggccatagcagccaagcccccattcccagagcagaccctctccccagaaggacccgcagcccttgttattgcctcgcttagatccaggacagagaggaaacaagcttcccacgggggaacaaggcctggatgaggatgttgatggggtctgtgaaagccacgcagcccctggtctggaatgcagttcaggctcagcaaactgtcagggtgctggcccctctgcagatggaatcagctccaggctgacaccagcagagtcctgcatggggctcgtgaggatgaatctctacactcactgcgtcaaagggctgatgctgtccctgctggctgaggagccgctgctgggagacagcgcaccantagaggaagtgtaccacagcagcctggcttcactgaatgggctggaagtccacctgaaagagacgctgcccagggatgaggcagcctccacgagcagcacctacaacttcacatattacgaccgcattcagagcttgctgatggcaaacctgccgcagtggccaccccgcatgatcgccgcttcctccaggccgtcagcctgatgcatagcgaatttgcccagctgcccgcgctttatgaaatgactgtcagaaatgcctccacggctgtgtacgcctgttgcaaccccatccaggagacatatttccagcagctggcacctgcagcacggagctccggcttcccaaaccctcaggatggcgccttcagcctctccggcaaagcaaagcagaagctgctgaagcacggggtgaacttgctctgaactgcacccaggaggtgactgggaaggagaaaaccagcaaaggaagctctgccttttataattgaaaaggcccctctattttatttttcttgaaaacattcccttttttaggaaccaaatgatatttgagtttttgttattccttttgcagattgggatgtgttttgggggcaggggttagttcttcaggtcggcagacccagagcacttgataaagaactgtatttaatcggtagtgttggggccgggacggcttggctccctctctgccatactgagcctgaggtatttcatatctcctgctgttccatcccagcttgaattggtgccacaagcttccaagttggcattttttctagaacctgatcgtccactagcccagagtgtgtgtgttcaacccccacaccaggtggtggtaggcggtgtgactgcacagcgaggtgccggatctgtgagcaggccgactccactcccacgccgcagtaggtttctccagtgcgctcttgctgggaggtccggatcgttcctgcagggaagcggcagnacacggagaccacttggttgaattctgttggaactctactcaaatctaggggcgtcttctttggacccacaatgggggcaagccttaataatatggaagggagtttgggctttagagatccctttataaaagctctgggggctgagccctgagaattcagtgacaacaggaccaacctgcgctgcctttgactacaagtgggccgtgcagctggttcctctcgagcgagtgtccctaaataggagtttacaagatgtctgggggtaaaagcactgtgcttttcagtggtggctgcgtgaaagggagcgacactcagctgtgtgttcctgggcttgtgtggtacttagaacctcagttctattacgttatagtcagacatttttttgacagtatgagacagactgcaggatgaaaatatttgtcaaaatcttaactgaatgtttactggaagtacttgagattccatttgagagttgtattgttaataatttcatgtcagtgaactgatatctgatgtttatgatatggtgtctttttcttgaaacaagcttccaagggctagaaataaaatagccaaaaaatgctggagttctgagtaaaaatggcagcatttttttgtgacaaaggtaagggttaagacagtgtgtgtgtgtn

SEQ ID NO: 95 - DNA, 514 bp, Homo sapiens
ggcacgagctgtgggctacctcactacacccactgctgccctggcctctgctcccacctcagtgttgtcccagtcaggagccttggtccgcatgcagggtgtcccatacacggctggtatgaaggatctgctcagcgtcttccaggcctaccagctacccgctgatgactacaccagtctgatgcctgttggtgacccacctcgcactgtgttacaagcccccaaggaatgggtgtgtttgtaggagagaaagccaggaggtaagagccagctgatatcctcggcgaacatgtctctcctgagtccagaagaccagcaccctcaacctggtagcttctttctggcttgtcaaagctcttcagaaggtacctagaggrgcccaagccccagctccatcctccacttattytgcctgtttcccccaaagacaatggctggaccctgcatgcaggctgggggtggaatgggytaacaytccgatggctgrrcaggmttcttgactggcacctggaaa

SEQ ID NO: 96 - DNA, 465 bp, Homo sapiens
  misc feature (375): n equals a,t,g, or c
  misc feature (406): n equals a,t,g, or c
  misc feature (417): n equals a,t,g, or c
gggcacgagctagaaaccactgctgacgtggaagagatcactggagaaggactcactgcttctggtagtggtgatgtcatgaggagacgtattgctaccccagaagaagttcgtcttcccctccaacatgggtggcggagagaggtgcgcatcaagaagggcagccaccgatggcagggggagacctggtattatggcccctgtggkaagaggatgaagcaatttccagaagtgatcaagtacctgagccgcaacgtggtacacagtgtccgccgagagcacttcagcttcagtccccgtatgcctgttggagatttctttgaaagaaagagacacgccagaggtgcagacccaaaggttaaatatgcttttgtncctgaagaagagttggtggacaaactgcagnttcctctcgtnggggtttaaagttcttgggcatttaatggtccgaaggcctcgtggcct

SEQ ID NO: 97 - DNA, 1459 bp, Homo sapiens
  misc feature (649): n equals a,t,g, or c
  misc feature (1104): n equals a,t,g, or c
  misc feature (1418): n equals a,t,g, or c
  misc feature (1434): n equals a,t,g, or c
gggagtccatgaacatcttcgagaccatcgtcaacaacaagctcttcttcaacgtctccatcattctcttcctcaacaagatggacctcctggtggagaaggtgaagaccgtgagcatcaagaagcacttcccggacttcaggggcgacccgcacaggctggaggacgtccagcgctacctggtccagtgcttcgacaggaagagacggaaccgcagcaagccactcttccaccacttcaccaccgccatcgacaccgagaacgtccgcttcgtgttccatgctgtgaaagacaccatcctgcaggagaacctgmrggacatcatgctgcagtgagcgaggaagccccggggtttgtcgtcgttgagcagcccccacggctgtcggtcagactcttgggtgtgtgttgtctgtgtggtccttgagtgggtttctcggatccgtgccctggaatacctggctcaggaatgctgtcagaccagccagccagcgagctctaggcaaaaggacatggaaactgtcacgttagctactgaatcctgggggcgagtgaaatactgaaaatccgagtgatgatgttgtgaatacggaacacctaatcacacagcttgctttgcttttacagaaacgttcctctttttctgacgcantttgaggaccgtgttgtgtgtgtatgtgtgtacacacgctctgtctttaatgacagaaacacaaaaaccagctggccttgcagacggcttttctaactcacaagtcttccctgagacagactaacctgaaagctttgcctaacagtagcttgtagagatccagtgcacgccgatgctgctaaactcagtgcctgagcccggccctgcagccccagccgcagtgtctgaaggccacctcccaaaggagcacgttgccttttcaaactcccgtgccgatttcctaagagcccctagtccaagcctctcagatgaagctgaggagccgtgcctaggatcccttcccagctctgaggacgggctgcagagctctgcaggtgtggattcaccttacgcccctacagcaggctcagcccttcccaccctgccccatgcccagcagcacaacacggagtagnacaggatgcccacggtgactgccgctccgtccgtgcacacacagcggtgctcttctccccttagccacccactgcccaacccaacggcaaagacacagaaaccaggtccccttgcagayggctctcccatcttcctgcaagtcatctgctcacacacagttggcagcacatagcgtttycttctttcagaaacattcctcttctgggggcttcagaaagctggcaaggccacttagcagagcttttgttaaatggccccagctgcttgggcgagctaaacagtggaccttttcggggaacccacagacgctggnaggaatcttggatttnttccaaattgccggttccaacatgg

SEQ ID NO: 98 - DNA, 879 bp, Homo sapiens
ggcacagctttgtggacattacccagaagccacagcctccaaggggccaacccaaaatggactggaaatggccattcgacttctttcccttcaaagtggcattcagcagaggagtattctctcaaaaatgctcagtctctcccatccttatcctgtgcctcttactacttggagttctcaacctagagactatgtgsaagaaaagaaaataatcagatttcagttttccctatgagaaactctgaggcagccacttatcttggctaaatagaacctcacctgctcatgaccagagagcatttaggataatagaggacctaactgaaggaatccttgtatatgaaaggagttattttagaaaagcaataaaaatattttattcatcatagctctctgctttgggctctgcaggccaccagatacacatgaggcccctacttctcaagctgggaaggccaagagccttccttcagcctttctggttatgttacacctagctgaatgtttacaaggtctggatccatcagccctcaggcacagttgggccaagcagaaagagagaaacacttctgctgtcaccttgaatgaactcaggaatagcttccctctggactgtagaggagctaactgtttggaacagaaaactgctggctgttgattttgtctggttcctttgccaacatctgggcacaccctttgcccagacacgagtggggaaagcagttctttctcctcagtttccaaagtaaatggggaatcccagctttcttttctactagcaaatgaccctaccatttatttctgcctttttcttccgttcattgtgaggaaaaataaaactggttgagagctttgttgtaaaaaaacctgtgccgaatt

SEQ ID NO: 99 - DNA, 248 bp, Homo sapiens
  misc feature (4): n equals a,t,g, or c
  misc feature (9): n equals a,t,g, or c
tttnttccncttcccttttttttttttttaagtccttcaggaggtattccagargaaggcattgttgtcatgggagataacagctccatgcatgttattgcccctgaagaccttccagtaaaacgagatgtggaggtagaagacagtgatatttgaccctgatcctatgtaggtctaggctaatgtgtgtgattgtgtcttagtttttaacaaaaaagtttaaaaagtaaaaaaaaaaaaaagaattc

SEQ ID NO: 100 - DNA, 480 bp, Homo sapiens
  misc feature (414): n equals a,t,g, or c
  misc feature (473): n equals a,t,g, or c
acccacgcgtccggccggggctgctgtgggagagttcggttgctgcggcggggcctgcacgttgactgtgggaaactcggaaacaagctcacatcttcctgtgggaaaccttctagcaacaggatgagtctgcagtggactgcagttgccaccttcctctatgcggaggtctttgttgtgttgcttctctgcattcccttcatttctcctaaaagatggcagaagattttcaagtcccggctggtggagttgttagtgtcctatggcaacaccttctttgtggttctcattgtcatccttgtgctgttggtcatcgatgccgtgcgcgaaattcggaagtatgatgatgtgacggaaaaggtgaacctccagaacaatcccggggccatggagcacttccacatgaagcttttnccgtgcccagaggaatctctaacattggctggsttttcctgstggtgtcctccggttanaagcccg

SEQ ID NO: 101 - DNA, 453 bp, Homo sapiens
gatagtggagaagccgcagacgaatggaggagctgaggatgctggaagaagagaaccagggtggaggaagtgacatgccctggagacttgtgggaagtgggttggagggaggccaggccggcagcgggaggccctgggagaaatggagagaggtcagcggagggctggcctcagccgcggctccttggtgggtgcctggcttggcaactgctagagcagggaggggggagggcaggggattacctaattagagtgggttagcttagattggtagctgctgaaactctcgttgagtcaggarcgggtaaaaggtaggtggggtggggagtgkggccccggggtggggcctgggcctctgcgtgcaaaccccagcctccctcttcttcctcaggctttggagcccctgagtttgagttcaataaaaactttatgtggtaaaaaaaaaactctgcc

SEQ ID NO: 102 - DNA, 903 bp, Homo sapiens
  misc feature (846): n equals a,t,g, or c
  misc feature (875): n equals a,t,g, or c
tttataatgaacaaattcaagaaaaaggactacggaaagttcaggacatcaaagaagtcaggcaaaactcaycttgacccctgttgcaggcaaaggaacgcagctggaagaaaagatgatataacagttaacaggatgcagacatggcagaggtttcctaaaaatctcattatctataaccatttctatatttacatttgaaaatctcctttggagacttagaacctctaaattattgacttattttttatataaggtcactccgatgaaaggtgattacaaaatcatctacattgctgtctacaaaacagataatatggatgtttgatcgcatctcattgttaactctttactgatatgtttgtaaatacagaagtgaaatgtggacataaaatagttacgctatttggttaatggtactagacaacatgtaattaatgacattcaaaaatttatggctagtgatatatataaagtaaaattttctttgcagtaaaatatgccctttattatagaagggaggatataaggaaccaacagtttgtatgaaaatagctcaaataatatcttttattttgattttaatatttcttattttggtttattagtgtcttagaacaaaatggccttatataatgaagcctagttatgctgggactgttttgatctcttttaattgttctggacagatagttggggatgagagccgaataaggtttgcctggaaataactggacactatattaatttctgctttgggcaaatactaagttctaacttgtcattcctggtaggaaccaagctttatttttcgagcctagccaatgatctaggagccagatgttnactccagtggccttttggcaattttgttngtgtgggggttttttttttttttaaaag

SEQ ID NO: 103 - DNA, 1788 bp, Homo sapiens
  misc feature (63): n equals a,t,g, or c
  misc feature (246): n equals a,t,g, or c
cagtactcgtgcccatatacaatctcttagtggctaggagagataaataaaagggccataatngtttgttctctttcagacataatttagtaggggacaagaagtctgttcttcagtgagtacactagagatttactctggtgactgccttttgagttatgggtgagtaaggtatggctttaccataaccttgattcattcacccttggattcatttctcgcccccgtcactgtatttccttgagnatatatctctgcctaacactttagtaggtgctatagaggatacatgaaaagtatgagatctggttccatccagtaagacattttaatagagaagatcaaaatgttacctggcagttggggaataatctgacttcgttggcagttggccttaacttcttaatcattgatccaggaatatttcaaccagagacacaactttctggcagacagacaaattgtacaacaccaacaatatcctggaccttgaaattctgtttacttcagtccattgtatcctttaaggcacctgtgctagcctagattttgtaataacactgatttatgagaatggacaaaagtggtagggaaattgttccctctccacttctgaagtatgatgatgtattaaggatggaggagttattaaaaatgytcttctgatgaggtaacaattagatgaaaccatgttaaagctgagatgaacacttagaaattcagggatattgggtctttagccttatgaatttgagctgcttatttaattggtgtaatttactacatattagtactatattcgtaaggattttttattaaccattacagattttacaaacagctagttatatggtaaacagattattatgcctttttgcaattctgaatatgattctagtatttgtgtagatgtatttggtactttttcccctaattccaacactagtttatatatatagcgaataaatctagttgtataaatttttaaatgccgtcagtagaaagcacacaaggttatgatttttttaattactggcttctgatttctttcacttctgatccttttcctttttctcagatgtagctgagtcttgatcattttaagacaacgatgggtagaattttgagattaatgttaattttccctttttgttaatttcagtcccctctcactatgcttttgtccagaaggatcaagaattctaccatcccttgggtctttgtgtataaacaatgttaaataaaggtagactcagtctttaagatattagacagtttttttagtccatgggattgtaaatataaacattaactttcctataagaatattttggctttgtaatctatagcctcaaattggtatttattatggattcactagacaaacagctgtttccttattgtcttttttctttagtgtttctgatttgctatcagtagctgtttttaaagccrtccaaggaaaataattatttacagtttttgaagtcacttttgagccctcatcaagctctcattgtgatgggagggatacctttttgttgttaaaagcctattattgttaaaggccttttatggaaaccaacttggaaaacaaccttaaatgtggatgtatcagatttggtttatccagccatgggagagaaaacaaacctaagtttactttacttgtacatatacactacaatggatagtatatttgctgtaaactacaatgtaaaacctcaataaaagtgcgctgtacttcttaatgtttattaaaagatgtatttttacaaaaaaaaaaaa

SEQ ID NO: 104 - DNA, 3319 bp, Homo sapiens
  misc feature (2555): n equals a,t,g, or c
  misc feature (3313): n equals a,t,g, or c
ccacttcctgcagcccagtttatctcaaatctgtcacattgggttaccttttcagccaaggcatctgacccgtgctatttgctgtcgtgtgacaagagatgggagtgcatttgaggatggactacgacatccctttattgtcaaccaccccaaggttggcagagtcagcatatatgattccaaaaggcaatccgggaagactaaggagacaagcgtcaactggtgtctggctgatggctatgacctggagatcctggacggtaccagaggcactgtggatgggccacggaatgaattgtcccgggtctccaaaaagaacatttttcttctatttaagaagctctgctccttccgttaccgcaggatctactgagactctcctatggtgaggccaagaaagctgcccgtgactacgagacggccaagaactacttcaaaaaaggcctgaaggatatgggctatgggaactggattagcaaaccccaggaggaaaagaacttttatctctgcccagtatagtatgctccagtgacagatggattagggtgtgtcatactagggtgtgagagaggtaggtcgtagcattcctcatcacatggtcaggggatttttttttctcctttttttttctttttaagccataattggtgatactgaaaactttgggttcccatttatcctgctttctttgggattgctaggcaaggtctggccaggccccccttttttcccccaagtgaagaggcagaaacctaagaagttatcttttctttctacccaaagcatacatagtcactgagcacctgcggtccatttcctcttaaaagttttgttttgatttgtttccatttcctttccctttgtgtttgctacactgacctcttgcggtcttgattaggtttcagtcaactctggatcatgtcagggactgataatttcatttgtggattacgcagacccctctacttcccctctttcccttctgagattctttccttgtgatctgaatgtctccttttccccctcagagggcaaagaggtgaacataaaggatttggtgaaacatttgtaagggtaggagttgaaaactgcagttcccagtgccacggaagtgtgattggagcctgcagataatgcycagccatcctcccatcctgcactttagccagctgcagggcgggcaaggcaaggaaagctgcttccctggaagtgtatcactttctccggcagctgggaagtctagaaccagccagactgggttaagggagctgctcaagcaatagcagaggtttcacccggcaggatgacacagaccacttcccagggagcacgggcatgccttggaatattgccaagcttccagctgcctcttctcttaaagcattcctaggaatattttccccgccaatgctgggcgtacaccctagccaacgggacaaatcctagagggtataaaatcatctctgctcagataatcatgacttagcaagaataagggcaaaaaatcctgttggcttaacgtcactgttccacctggtgtaatatctctcatgacagtgacaccaagggaagttgactaagtcacatgtaaattaggagtgttttaaagaatgccatagatgttgattcttaactgctacagataacctgtaattgagcagatttaaaattcaggcatacttttccatttatccaagtgctttcatttttccagatggcttcagaagtaggctcgtgggcagggcgcagacctgatctttatagggttgacatagaaagcagtagttgtgggtgaaagggcaggttgtcttcaaactctgtgaggtagaatcctttgtctatacctccatgaacattgactcgtgtgttcagagcctttggcctctctgtggagtctggctctctggctcctgtgcattctttgaatagtcactcgtaaaaactgtcagtgcttgaaactgtttcctttactcatgttgaagggactttgttggcttttagagtgttggtcatgactccaagagcagagcagggaagagcccaagcatagacttggtgccgtggtgawggctgcagtccagttttgtgatgctgcttttacgtgtccctcgataacagtcagctagacacactcaggaggactactgaggctctgcgaccttcaggagctgagcctgcctctctcctttagatgacagaccttcatctgggaacgtgctgagccagcaccctcagatgatttccctccaaactgctgactaggtcatcctctgtctggtagagacattcacatctttgcttttattctrtgctctctgtacttttgaccaaaaattgaccaaagtaagaaaatgcaagttctaaaaatagactaaggatgcctttgcagaacaccaaagcatcccaaggaactggtagggaagtggcgcctgtctcctggagtggaagaggcctgctccctggctctgggtctgctgggggcacagtaaatcagtcttggcacccacatccagggcagagaggtctgtggttctcagcatcagaaggcagcgcanccctctcctcttcaggctacagggttgtcacctgctgagtcctcaggttgtttggcctctctggtccatcttgggcattaggttctccagcagagctctggccagctgcctcttctttaactgggaacacaggctctcacaagatcagaacccccactcacccccaagatcttatctagcaagcctgtagtattcagtttctgttgtaggaagagagcgaggcatccctgaattccacgcatctgctggaaacgagccgtgtcagatcgcacatccctgcgcccccatgcccccatgcccctctgagtcacacaggacagaggaggcagagcttctgcccactgttatcttcactttctttgtccagtcttttgtttttaataagcagtgaccctccctactcttctttttaatgatttttgtagttgatttgtctgaactgtggctactgtgcattccttgaataatcacttgtaaaaattgtcagtgcttgaagctgtttcctttactcacattgaagggacttcgttggttttttggagtcttggttgtgactccaagagcagagtgaggaagacccccaagcatagactcgggtactgtgatgatggctgcagtccagttttatgattctgcttttatgtgtcccttgataacagtgacttaacaatatacattcctcataaataaaaaaaaaacaagaatctgaaaaaaaaaaaaaaaaaaaaaaaaaaaaaaaaaaaaaaaaaaaaaaaaangggggg

SEQ ID NO: 105 - DNA, 1986 bp, Homo sapiens
  misc feature (1227): n equals a,t,g, or c
tatgtaatggaaagtcgtgatcctagtacaaatgtgatattattggaggatactgctgcagtcttgggagttataatagcagccacttgcatgggccttacttctataacaggcaatccactgtatgacagcctaggttctttgggtgtgggcaccttattaggcatggtctcagcattcctcatctacactaacacagaagcactcttagggcggtccatccagccagaacaagtacaacggctcactgaactcctggagaatgacccatcagtaagggcaattcatgatgttaaagccacagatctgggattaggtaaagtaagatttaaggcagaagtagattttratgggcgagttgttacaagatcatatttggaaaaacaagattttgaccaaatgttacaagaaattcaagaagtgaaaactcctgaagaactagagacctttatgcttaaacatggagaaaatattattgatactttaggagctgaagtagatagacttgagaaggaactgaaaaaacgaaatcctgaagttcgacatgtagatttggagatactgtgagtttgatggaatgaatcacctgggtggggaccttggaaacaagtttgtccgtccactctacaaagtttcctcctctcctacactgaaagactcagtgccatgcagaagccttttttttaagatgaaggaaatattttatgtaaagagcaactcagcaggacacagaactaaaactactacttacatctaacagacacactacaagttgaatcaatttgaaaatcatgtttttatgcttccatagggaacattttggttatttaaattgttcataatgtcccatatttcacctgttcagtgtatactgtactttgcaatcatctttccttttttcacattggtaaaaataagtggcatccataggatcatgatttttaatttgttgcctctgaagatttcactccatcaagatctgccaatcttcaatattctggctaaatcttggtatgtggtttttaaacagtcactccgtttcaaagtctgtctttccttatagaatgtggaaattatttctccataccttgtgattttgacctgagtgctaagagaatcactctccttacctagttatctacaaatgttcattccagaaatgtttagttactgaattgaatgaagacatctcagtacactcttttaggtcatagtagttgccatytngtaaaatttcttttttcttctttgcttttttccccttatttggtttaatttttctaatgttaggagatatagtcctagatatttccatgggccagtgtgatgacttttttttaaatgaggttcagtaccataatgtttatttactggaagataatgcatttataagcattttaaaattctgtaaagtgggttagaaatatttataattttacaggcaggacagcatttgacttttatttaaaaggcggcactacttatgtaaatctgagctgtgggatatttcttgctttaagagagagacagaatctctcactgaaactcatggtcatgattttgtataatatagttcatactgtgtctgtgagtttcttcarttacaaatgggcatttagtatagttatattgactataacatgtaagtaaatagctttctactgaccctaagttatcaaggtggaaaaaaaacatgcaattcagtaattgaaaatgtggtgaaaagctgcagctgtcatcatcaaaacaactcataacatactttaaaatgttcaggtagcagtgagcattgttcatatgagaatggcggctgggtgatctctttgctgaattaatgagttcttaacatgtggacccaactgcctgtgtgagatctgtgtcttaaaacttactggaatggaaatctatgaattattgcaaattgtaatgctggaaacaaaaaataaatccttggttaaagggtttgtaatggtgaaaaaaaaaaaa

SEQ ID NO: 106 - DNA, 591 bp, Homo sapiens
  misc feature (565): n equals a,t,g, or c
  misc feature (567): n equals a,t,g, or c
  misc feature (583): n equals a,t,g, or c
cgtttgtttagagaagatgaatttttaaaaagcagataaattgctaatgagcaataatgaccttatctttaccaaaacactgaaaattaagagaggttcagtgttgaagaagcacaatatgctgcggtgtctttttctagaagtgaatggaaatcttgctcagttggcatttcaagcaggaaatgaaatgcttgctttaatggcaaagcagcgttaacatttttcctgtcgtgtagcagagagtacaagaatcatttcagcaaagcagtgactcaccatgagacgttatctccatggagctgcgttttgacttttcccactctcttactcatagaaggaggacaaaggaacgaaatgaaatcatgctcacaatgaaactgttcattacatcaactgatctctctctctctctcttcctctctttctctttctcccataccccaaggcaaaatttttttaaagaaatgactttaaaaactatcatttctgtattttaattacatctcttagaaataaattatgtttgcaccatagctttctaggaaaaaaaaatgtgtttttaacngngtcttggtggcttagngctttatt

SEQ ID NO: 107 - DNA, 153 bp, Homo sapiens
  misc feature (144): n equals a,t,g, or c
tcccccgggctgccagaattcggtcagagtgcatccttacctttgttgccagctgctgttgctgccccctttgatgatgatgacaagatcgttgggggctacawctktgaggagaaattctgtccccctaccaggtgtccttgnaattctggc

SEQ ID NO: 108 - DNA, 1536 bp, Homo sapiens
  misc feature (1482): n equals a,t,g, or c
aattcggcacgacggaactgccacgatgctgccactttggactctttcactgctgctgggagcagtagcaggaaaagaagtttgctacgaaagactcggctgcttcagtgatgactccccatggtcaggaattacggaaagacccctccatatattgccttggtctccaaaagatgtcaacacccgcttcctcctatatactaatgagaacccaaacaactttcaagaagttgccgcagattcatcaagcatcagtggctccaatttcaaaacaaatagaaaaactcgctttattattcatggattcatagacaagggagaagaaaactggctggccaatgtgtgcaagaatctgttcaaggtggaaagtgtgaactgtatctgtgtggactggaaaggtggctcccgaactggatacacacaagcctcgcagaacatcaggatcgtgggagcagaagtggcatattttgttgaatttcttcagtcggcgttcggttactcaccttccaacgtgcatgtcattggccacagcctgggtgcccacgctgctggggaggctggaaggagaaccaatgggaccattggacgcatcacagggttggacccagcagaaccttgctttcagggcacacctgaattagtccgattggaccccagcgatgccaaatttgtggatgtaattcacacggatggtgcccccatagtccccaatttggggtttggaatgagccaagtcgtgggccacctagatttctttccaaatggaggagtggaaatgcctggatgtaaaaagaacattctctctcagattgtggacatagacggaatctgggaagggactcgagactttgcggcctgtaatcacttaagaagctacaaatattacactgatagcatcgtcaaccctgatggctttgctggattcccctgtgcctcttacaacgtcttcactgcaaacaagtgtttcccttgtccaagtggaggctgcccacagatgggtcactatgctgatagatatcctgggaaaacaaatgatgtgggccagaaattttatctagacactggtgatgccagtaattttgcacgttggaggtataaggtatctgtcacactgtctggaaaaaaggttacaggacacatactagtttctttgttcggaaataaaggaaactctaagcagtatgaaattttcaagggcactctcaaaccagatagtactcattccaatgaatttgactcagatgtggatgttggggacttgcagatggttaaatttatttggtataacaatgtgatcaacccaactttacctagagtgggagcatccaagattatagtggagacaaatgttggaaaacagttcaacttctgtagtccagaaaccgtcagggaggaagttctgctcaccctcacaccgtgttaggagactactgttatttgaccaatgaattgacttctaataaaatctagtggtgatgcaanaaaaaaaaaaaaaaaaaaaaaaaaaaaaaaaaaaaaaaaaaaaaaaaaaaaagg

SEQ ID NO: 109 - DNA, 512 bp, Homo sapiens
  misc feature (29): n equals a,t,g, or c
  misc feature (55): n equals a,t,g, or c
  misc feature (58): n equals a,t,g, or c
  misc feature (60): n equals a,t,g, or c
  misc feature (512): n equals a,t,g, or c
tggaacggtcccttcgacgccgcacctgnaaacttcaatgccatgccgcccaagncgncnggatgacgtggcacagccaagaaacagtctgggagaatcgaagttccaacaagtgcccgtggaccctgccacatatggacagttctatggaggcgacagctacatcattctgtacaactaccgccatggtggccgccagggcagataatctataactggcagggtgcccagtctacccaggatgaggtcgctgcatctgccatcctgactgctcagctggatgaggagctgggaggtacccctgtccaggtgagcccagcccaccscctctctgggctgcagcctgagccttgtccttctcttcactcatctgtctgactctcatccatccattcgtttgtccatctgtctgtctgtccatscatccatccatccatccatccatccatccatccatccatssaacagrtattgattcctgggctgacttcgagcttaatatttttttattn

SEQ ID NO: 110 - DNA, 1455 bp, Homo sapiens
  misc feature (786): n equals a,t,g, or c
  misc feature (846): n equals a,t,g, or c
ggcacgagcccacccagcctgcccccaggtggacatcccagccacctagaccttcctgtgagtgacccagccccttccactctcagactggcctattggtgtgggccccgtgaggcagtcataacacagggatgaaacctggctctgscacttcccaaggtgggtgacttcacttctctgagcctcagtttcctcttctgagcatgggcctgaatgagacgtgtgtaaagtaccaagcacagtggtgagccaatggaagacacgcagytagccaccagcagtcatcaccaaagatgcctctgatttgtgactctgaaaattcttgcaaagctgagaaggtgaaattcctctggctatattgttgaccaaaggccctcctctgtaagagtgaattgcacgctcacttgaaactatcttgagggactaaggtgtacaatcctggtgcttatgcagtttggggctctaggtagacacgagctggctttgaaattgtagattcctacactccccctttctrgagttctgggtctaagtgaattgactcctatttctgttgtgaatgttgtagtttcccttcccattctcttggtggccctggaagcttctaggcacagtgtgcaccctgattattcccaccactccatccaacttttctctctctgtggtgtctgcaccacaagctgcctaccctccaggtgcctcaatggtccggccaccagttgtgcctcggcgccccccggcccacatcagcagtgtcaggcaggcctccacccaggtgccacgcanggtgcctcatacccagagagtagccaacattggtactcagaccacaggacccagtggggntagggatgctgtacaccaggccggccgctcctgccgtgcaaatgttcctcagcagcacatagcacctatcgggtccaggagccggctgtgcacatcccaggacaggagcccstraccgcgtccatgctggctgcggcgcccctgcatgagcaaaagcagatgattgaaggtgttccacacaggggagcgtctctacccccttatccatgatgtccacacccagctggctggcaagatcacgggcatgctgctggagattgacaactcrgagctgttgctcatgctggagtctccagaatccctccatgccaagatagacgaggcagtggccgtgctgcaggcacaccaggctatggagcagccgaaggcgtacatgcactgaaaccagaaaaggaaatcctcgcttccatggctgccaaaaggacagtgtttctggctctcagccctaaggccctgcaaactctaacttatttcccaattagtctgtatctatacttgggctctgtatgtgaatgaaggttggtcacccatccagcctattaccttttgctttgtgtattaaaagtgctgcaaaatcaaaaaaaaaaaaaaaaaaaaaaaaaaaaaaaa

SEQ ID NO: 111 - DNA, 675 bp, Homo sapiens
  misc feature (617): n equals a,t,g, or c
  misc feature (647): n equals a,t,g, or c
  misc feature (659): n equals a,t,g, or c
gtggtttccgcccggcagcccgcagcccgctggccgcccttcgtctgggtctccgcccccaggacccgcggccgagagctccggagcgcggcttccccggccggctgcgcgatgggctgcgggaactccaccgccaccagcgcgggcgcgggccaaggccctgcaggagcagccaaagatgtaacagaagaatccgtaacagaagatgacaagaggagaaactatggaggagtatatgttggcctaccatctgaagctgtcaatatggtgtccagtcaaacaaagacggttcggaaaaattagaagaaaataacatcatgactcaagaatcaagagcttgctcatcagtttggaaggaatttggctccgtgggacgttgtaatgtgcacagacatttccaaggaaattctaaacagtcacccttcccttttgcattcccccaaatcttaagtgtatacataaaaccctgggtacatattgttgtggtaatagaagggaattggttaaacagtacacttgtttatggractttctgtggccacctacgaaagacaagttacaamctscakggaggcygttgttgcccagccaggggccgckgcattttgacaacattnccaccctggccactcagcacatttcatggngggcatgccttncactgaaccttttgat

SEQ ID NO: 112 - DNA, 548 bp, Homo sapiens
  misc feature (521): n equals a,t,g, or c
  misc feature (545): n equals a,t,g, or c
ggcacgagtgaacctccagctttagcaactcatatatcagtctctcacatggccacaattctagacaaaaaccaaagacccagaggccagagcaaagtaggacctccacacagcaggtgatttcccgtgtgacatattttcttcatagtccctaatatagtcatcctctacagagttggcgtgctgtgtgcactgtggattaggaacagagtggagctgtaaccagtctcttctctggccctttgcctttatgtcagcttgcacttttgcctcacttattcctagtccagctcccaactgcctgacttaatggaccagaacggagatttggatattaagatgcagarggggaggggaagggatggtagagatagacagctctcccctactaggttgggtcatttcccctaataactatagagagactgtgtttcaactctctttycattgctgtttccaraagagtggagagtgtggtttcaggcaaggtattaatgatamaattccgtggtattacagcnccctgtggacatttggaagtttcnttt

SEQ ID NO: 113 - DNA, 476 bp, Homo sapiens
  misc feature (342): n equals a,t,g, or c
ggcasagaggcgtcggtrctcagcggtgttggaacttcgttgcttgcttgcctgtgcgcgcgtgcgcggacatggcctcaaacgattatacccaacaagcaacccaaagctatggggcctaccccacccagcccgggcagggctattcccagcagagcagtcagccctacggacagcagagttacagtggttatagccagtccacggacacttcaggctatggccagagcagctattcttcttatggccagagccagaacagtgagtctttctcagcgggtcacctcttcctactctttctgaatattgcttttctttttcttgttttttggagacggagtntggtcctgttgcccaggctggagtgcagtggtgctgtctcagcttcactgcaacatcagcctaccgggttcaaacgaattytccctgcctcagcctcctgagtagctgggaattacaggtacctgctaaccaag

SEQ ID NO: 114 - DNA, 1016 bp, Homo sapiens
  misc feature (885): n equals a,t,g, or c
ggagctgcagagaaatttcgtgaacatcggccaactaagctgaagagcctcctgcgcctggtgaacactggtaccagcaggcccatcatcctggatccggccgaccccaccctcaacgtggcagaagggtacagatgggacatcgttgctcagagggcctcccagtgcctgaaacaggactgttgctatgacaacagggagaaccccatctccagctggaacgtgaagagggcacgagacatccacttgacagtggagcagaggggttacccagatttcaacctcatcgtgaacccttatgagcccataaggaaggttaaagagaaaatccggagaccaggggctactctggcctgcagcgtctgtccttccaggttcctggcagtgagaggcagcttctcagcagcaggtgctccttagccaaatatgggatcttctcccacactcacatctatctgctggagaccatcccctccgagatccaggtcttcgtgaagaatcctgatggtgggagctacgcctatgccatcaaccccaacagcttcatcctgggtctgaagcagcagattgaagaccagcaggggcttcctaaaaagcagcagcagctggaattccaaggccaagtcctgcaggctggttgggtctggggatctatggcatccaagacagtgacactctcatcctctcgaagaagaaaggagaggctctgtttccagccagttagttttctctgggagacttctctgtacatttctgccatgtactcccaraactcatcctgttcaaycactttgtcccattgtctactgggaaggttcccaggtcttccaccagttttacaatgagttattcccaggccagacgtggtagcttcacacctgtaancccagaactttgggaggccgaggtgggaggagcgcttgagccgaggagttcaagaccagcctgggtattatagggagaccccgtctctacaaaattaaaaaataatttacaaaaaaaaactgtgccgaatt

SEQ ID NO: 115 - DNA, 494 bp, Homo sapiens
  misc feature (366): n equals a,t,g, or c
  misc feature (426): n equals a,t,g, or c
  misc feature (449): n equals a,t,g, or c
  misc feature (490): n equals a,t,g, or c
cggaggctgaagaagaagaaaacaaccataaagaaaaacactctcaatcctgtctacaatgaggccatcatctttgacattcccccggaaaacatggatcaagtcagcctgctcatctcagtcatggactatgatcgagtgggccacaatgagatcataggagtctgtcgtgtggggatcactgctgaaggcctgggcagggaccactggaacgagatgctggcatacccccggaagcccatcgcacactggcactccttggtggaggtaaagaaatccttcaaagagggaaaccctcggttgtgatttcattcacgtggatgctgcaacagaagagactgccacctggagttaggatggcagggncgagctgctagcttcgacagtgagagctcgtgcccatttccgaaaccacttccaacaccngagatgtgcagccaattacacantgggattcagcatgttcctttgcattgttcaacgttaaaangttt

SEQ ID NO: 116 - DNA, 3236 bp, Homo sapiens
  misc feature (8): n equals a,t,g, or c
  misc feature (33): n equals a,t,g, or c
  misc feature (51): n equals a,t,g, or c
  misc feature (2923): n equals a,t,g, or c
  misc feature (3235): n equals a,t,g, or c
  misc feature (3236): n equals a,t,g, or c
ccttttgnaaaaatcgatccatttggtggtgancctttcaaaggttcaganccatttgcatcagactgtttcttcaggcaatctactgatccttttgccacttcaagcactgaccctttcagtgcagccaacaatagcagtattacatcggtagaaacgttgaagcacaatgatccttttgctcctggtggaacagttgttgcagcaagcgattcagccacagacccctttgcttctgtttttgggaatgaatcatttggaggtggatttgctgacttcacacattgtcaaaggtcaacaatgaagatccttttcgttcagccacatcgagctctgtcagcaacgtagtgwttacaaaaaatgtatttgaggaaacatcggtcaaaagtgaagatgaacccccagcactgccaccaaagatcggaactccaacaagaccctgccctctaccacctgggaaaagatccatcaacaaattggattctcctgatccctttaaactgaatgatccatttcagcctttcccaggcaacgatagccccaaagaaaaagatcctgaaatattttgtgatccattcacttctgctactaccactaccaataaagaggctgatccaagcaattttgccaacttcagtgcttatccctctgaagaagatatgatcgaatgggccaagagggaaagtgagagagaggaagagcagaggcttgcccgactaaatcagcaggaacaagaagacttagaactggctattgcactcagcaaatctgagatatcagaagcatgaagaattctcttgttctttggcaacaatatagtattcttcttcctgaatactgaaactatttacaatgtgtatcaaaactacctgtgagcatgggaatacaaaaggtttgagattcctgtaaatgtgacaaaattttaggrttttttttttttcttcattacagattcgtctttttttttttttcttataaaagccgtaacccagtcagacaaattcaccttcacttaggcccctgttctggtatacatttactgtgagcttttgcctgcctgtgctattttacttgtaaagctagagcacccaagcttctgccttctggaatatagagaaatagtttcaccctgcactaccctgttctgtagttattctgatgatagccagtgaggttcttaaagtttgcagtattctcccctgattggaatggttgagtgagggtaagggaaagaatatcttatttcttttatgattggtgcaaattggctaaagtgcatttttaaatttcctctacttaatttgtttttcagagataaggaaaaatattttgcacagatttactccactatggaaaagggatgctgtaggttgaaccattatagcctcagattcgatcttttcctaactaaaaatattaaagcctcatgtgtgaaataaatttttaaaaagatttatctggatttagagaattttagatcaacagatacctctcagtgtgtttgctaattaataaaaatcagtttcttacaaataaagtttgtaagaaaatgttcattttaagtgatagatagtggagaaaatttatcacctaaaatatacccatcagtataaggcaagcaaaagtcttaacatggcagccattctgcctttgccgtggccctgtcctgtttagttcttagtgggttaatttttgtacttttgcagaagaaacttcagcaagctagaactggaaggtactttaatttttcatatatatttgttttttttttttaatgaaggctcatttacttgaaatgtaaaaactttcactgaatacaaatagaaaaagtgatgtgttttatatcatattgctttttgtccatctttgtggtttagtttatttactcacttcatgtttttcacctataaaattgtcaagctagcaaaaaaactcttgtttttttaattgggagagaagagacctgccagattatcagacctcttcatgttaaaagaccatctcctgtaaaactgacctagtggacaagctgaatttgaaatagactgtgaagtaagctgtaacttgtcattttaattttgtttaacacggttactgacttagatgatgtattaaataccaagataaagaaaaatgcacctaaaatctaattagaattctctgggtcamcaagtcaaggtggtattgatctgtgttaatctgagtaacttattgcctagcctataaataaattccaaaatatccaattcatttcttcttgaaatggtgcttgttttgttttctttccattacacaattagactcctacagtttaaaacaaactttaaaccactatcttgcactgctaacttttttctacctttgtaaatagaaacatttctgcataaaagtcatacatatgaagcaagggctgaatcataatcacaaggcttaattttgataaacgaatccagtgacctaaggattttctgcaaaatttgactgggagttgtgataggtggtatttttgtttattttcttcctcttactccttaggataaaggtaagttgacttgaacaactttcttttgcactgggaaaataagcaaatgtttaaatgcttcaaaaaaattttcaattaaactcaaatattaaatatctataacttataaacaccaactttcaatgtaataaatgtatcctaatcttatgtatgtttaactggattacatagatttttatcttttgttaaaatgtgtataccccgtggaccaacataatattaaagtatgtatatattatataaatatatatgtatatgtgctcgcttgtgtaggatgaatgtcttagagtcgtttgtggtattttatgttgttgactctggctccagggcctgtgcttgaaaaggacagataagtattgcccagagctaagtggcactacntacaaagttttaaatgtcttctacatactgattcatgtttatttgagctctctttatagaattttctcttaaagtttcaaacctctaagttgtagcctgtaattatgagaacagtaaactttaagtaataataaagaatcccatccatatatccaatttgcaattgagttttgcatggttctctgattatgtccatgctgtgtccaaggaggagtaggtacatacaatcagcacagattaatatatgtaaagggtttgggacagcacctggtatagaataaataataaatgtaaactattaaaaaaaaaaann

SEQ ID NO: 117 - DNA, 911 bp, Homo sapiens
  misc feature (25): n equals a,t,g, or c
  misc feature (688): n equals a,t,g, or c
  misc feature (873): n equals a,t,g, or c
  misc feature (910): n equals a,t,g, or c
  misc feature (911): n equals a,t,g, or c
tctctccggacacaccatgataagnacgctgctgctgtccactttggtggctggagccctcagttgtggggaccccacttacccaccttatgtgactagggtggttggcggtgaagaagcgaggcccaacagctggccctggcaggtctccctgcagtacagctccaatggcaagtggtaccacacctgcggagggtccctgatagccaacagctgggtcctgacggctgcccactgcatcagctcctccaggacctaccgcgtggggctgggccggcacaacctctacgttgcggagtccggctcgctggcagtcagtgtctctaagattgtggtgcacaaggactggaactccaaccaaatctccaaagggaacgacattgccctgctcaaactggctaaccccgtctccctcaccgacaagatccagctggcctgcctccctcctgccggcaccattctacccaacaactacccctgctacgtcacgggctggggaargctgcagaccaacggggctgttcctgatgtcctgcagcagggccggttgctggttgtggactatgccacctgctccagctctgcctggtggggcagcagcgtgaaaaccagtatgatctgtgctgggggtgatggcktgatctccagctgcaacggaractctggcgggccactgaactgtcaggcntctgacggccggtgkcaggtgacggcatcgtcagcttcgggtctcgcctcggctgcaactactaccacaagccctccgtcttcacgcgggtctccaattacatcgactggatcaattcggtgattgcaaataactaaccaaaagaagtccctgggactgtttcagacttggaaaggtcacagaangaaaataatataataaagtgacaactatgcaaatccnn

SEQ ID NO: 118 - DNA, 1977 bp, Homo sapiens
  misc feature (4): n equals a,t,g, or c
  misc feature (1948): n equals a,t,g, or c
  misc feature (1958): n equals a,t,g, or c
cggnacggtggcgccccctgagcctgggtagcggcgcgagggccgggagaaccgttcgcggaggaaaggcgaactagtgttgggatggccaccaactgggggagcctcttgcaggataaacagcagctagaggagctggcacggcaggccgtggaccgggccctggctgagggagtattgctgaggacctcacaggagcccacttcctcggaggtggtgagctatgccccattcacgctcttcccctcactggtccccagtgccctgctggagcaagcctatgctgtgcagatggacttcaacctgctagtggatgctgtcagccagaacgctgccttcctggagcaaactctttccagcaccatcaaacaggatgactttaccgctcgtctctttgacatccacaagcaagtcctaaaagagggcattgccagactgtswkccttcwgwwttcscwcagactgtgttcctgggcctgaatcgctcagactacatgttccagcgcaggaagatggctccccagccctgaaacagatcgaaatcaacaccatctctgccagctttgggggcctggcctcccggaccccagctgtgcaccgacatgttctcagtgtcctgagtaagaccaaagaagctggcaagatcctctctaataatcccagcaagggactggccctgggaattgccaaagcctgggagctctacggctcacccaatgctctggtgctactgattgctcaagagaaggaaagaaacatatttgaccagcgtgccatagagaatgagctactggccaggaacatccatgtgatccgacgaacatttgaagatatctctgaaaaggggtctctggaccaagaccgaaggctgtttgtggatggccaggaaattgctgtggtttacttccgggatggctacatgcctcgtcagtacagtctacagaattgggaagcacgtctactgctggagaggtcacatgctgccaagtgcccagacattgccacccagctggctgggactaagaaggtgcagcaggagctaagcaggccgggcatgctggagatgttgctccctggccagcctgaggctgtggcccgcctccgcgccacctttgctggcctctactcactggatgtgggtgaagaaggggaccaggccatcgccgaggcccttgctgcccctagccggtttgtgctaaagccccagagagagggtggaggtaacaacctatatggggaggaaatggtacaggccctgaaacagctgaaggacagtgaggagagggcctcctacatcctcatggagaagatcgaacctgagccttttgagaattgcctgctacggcctggcagccctgcccgagtggtccagtgcatttcagagctgggcatctttggggtctatgtcaggcaggaaaagacactcgtgatgaacaagcacgtggggcatctacttcgaaccaaagccatcgagcatgcagatggtggtgtggcagcgggagtggcagtcctggacaacccataccctgtgtgagggcacaaccaggccacgggaccttctatcctctgtatttgtcattcctctcctagccctcctgaggggtatcctcctaaagacctccaaagtttttatggaagggtaaatactggtaccttcccccagctttccatctgaggaccagaaaagttgtgtctcccttagatgagatctagacgcccccaaatccttgagatgtgggtatagctcagggtaagctgctctgaggtaaaggtccatgaaccctgccccactcctgtcagcccctcatcagccttttcagcaggttccagtgcctgacttgggataggactgagtggtaggaggagggggagtggagggcatagcctttccctaattctgccttaaataaaactgcattgctgattcaaaaaaaaaaaaaaaaaaaacncggggggggncccggtaccaaattggcct

SEQ ID NO: 119 - DNA, 804 bp, Homo sapiens
  misc feature (99): n equals a,t,g, or c
  misc feature (756): n equals a,t,g, or c
  misc feature (803): n equals a,t,g, or c
ggcacagaggtgatgaaaccacccacagctttgttgggggtattatatttctttatttttttgttttttagcccatcacaacattgataactgatgttnaaactgcttgagcatcaggatactcaaagtggaaaggatcacagatttttggtagtttctgggtctacaaggactttccaaatccaggagcaacgccagtggcaacgtagtractcaggcgggcaccaaggcaacggcaccattggtctctgggtagtgctttaagaatgaacacaatcacgttatagtccatggtccatcactattcaaggatgactccctcccttcctgtctatttttgttttttacttttttacactgagtttctatttagacactacaacatatggggtgtttgttcccattggatgcatttctatcaaaactctatcaaatgtgatggctagattctaacatattgccatgtgtgggagtgtgctgaacacacaccagtttacagggaaagatgcattttgtgtacagtaaacggtgtatataccttttgttaccacagagttttttaaacaaatgagtattataggactttcttctaaatgrgctaaataagtcaccattgacttcttggtgctgttgaaaataatccattttcactaaaagtgtgtgaaacctacagcatattcttcacgsagagatttycatctattatactttatcaaagattggccatgttccactkggaaatggcatgcaaaaacnatcatagaaaaaacctgcgttactccatctgaccaattccaaagaana

SEQ ID NO: 120 - DNA, 737 bp, Homo sapiens
  misc feature (707): n equals a,t,g, or c
  misc feature (713): n equals a,t,g, or c
  misc feature (715): n equals a,t,g, or c
taactgatcatccaggaagaacaggtagaccaacccttcctggtaaagtaactgaggaaattgtctcaagtgagcatgatgagggtttatctttctcaggaaaggtgcagtgctatggtagggagttaaaccagcctgcctcagctgccaaatgcacaggtgacttcagtccttctcctgaaaaactggtaaaatcaggaaatccattgcagccagttagtatagagaatagaaatttggacttaaaacatcttgtcttggagtccagtgaacctccatttggtcctagaaatgttattgaaaataagtctttgtctgacacattggtttccacaactgcaccaagtggtatagtgaatgtgtcagtaaaacagcagactagccctaaaagcagtcagaaccatctctttcccggtgatttgaaaacagatgaaggcatttatctgcaggtgaagtccttgacagctgcctcggttgatggagcttattctacacagggatgcatgtgctcagtggtccccacgctttgttcttcctcagacaatgctacattaacccattatgtaagaccaataaatgcagagccagcgtttcaagcacagaataccagcaggcagaatggccagtttgcttaagaatggtgagcctgaagctgagttacataaagaaaccacaggtccaggcactgctggccctcagtccaacancacatntngttttaaaaggtgaacgcaaag

SEQ ID NO: 121 - DNA, 1252 bp, Homo sapiens
  misc feature (65): n equals a,t,g, or c
agggccctagcagccgggctggtcctgctgcaagccggcggcccggaagtggggcggcgggtgtncttaaggacagttttattttaagcaattctwagtctcaagtaaacaccatcattaaaagaactgagaactattatcaattcttcctttggagtccatcttcaatggaaaggagaagggaaaaccttttttaaaaagaagaaagaaaactgaagtttttgatttgactagagaaatattcagaagactccttattttcacctagtctaatcacaaaattgagaaacaaacattatcccttgaccatgtaaattttacaccacattatgtcaacagcatgtaccttccacattgagtattcagaaagaagtgatctgaactctgaccattctttatggatacattaagtcaaatataagagtctgactacttgacacactggctcggtgagttctgctttttctttttaatataaatttattatgttggtaaatttagcttttggcttttcactttgctctcatgatataagaaaatgtaggtttctctttcagtttgaattttccyattcagtaaaacaacatgctagraaacmaacttttggraaggcattgtaactattttttcaaatagaaccataataacaagtcttgtcttaccctaaagtcaaatgctgaagattctttactgctgtcatcagcatctacaagtagcatattttggatggtgtttgtgtgctacttcaaagtaactaggaaaaaataatcctcgcaacacaggtaccttgtcatgtcagaattgggggtgttaggttgccagttgtatcagtgttgattcatttcattacttcctacagagcaaacatgaacgttggagttgcccacagtgaagtgaatccaaatacccgtgtcatgaacagccggggtatgtggctgacatatgcattgggagttggcttgcttcatattgtcttactcagcattcccttcttcagtgttcctgttgcttggactttaacaaatattatacataatctggggatgtacgtatttttgcatgcagtgaaaggaacacctttcgaaactcctgaccagggtaaagcaaggctcctaactcattgggaacaactggactatggagtacagtttacatcttcacggaagtttttcacaatttcyccaataattctatawtttctggcaagttctatacgaagatgatccaactcacttcatcctaaacacaggtg

SEQ ID NO: 122 - DNA, 1848 bp, Homo sapiens
gcagtaccgtccgaattcccgggtcgacccacgcgtccgcagctcctgttggagttcagtttctggaatgagcctgtgccaagatccggacctaatatatatgaactcaggtcttaccaactccgaccaggaaccatgattgaatggggcaattactgggctcgtgcaatccgcttcagacaggatggtaacgaagccgtcggaggattcttctctcagattgggcagctgtacatggtgcaccatctttgggcttacagggatcttcagaccagggaagacatacggaatgcagcatggcacaaacatggctgggaggaattggtatattacacagttccacttattcaggaaatggaatccagaatcatgatcccactgaagacctcgcccctccagtaaagctgtagagtttctatgtgcctacatacatttctgtgacaagtatttgtcgtaaattaattttaattgtgtatcaagtgaaaaagaaacactgaggttttaagctgctgtatatagcttgtgagaaacctcttttctttaaaatttacataatcacaagaaaggaaagaattacagttggactgattgtgacagtgccttgtcgtcctctttgaaacaccccgtgttgtccagtataccttataacacttagccacttctccccaccctccagaaggggtccacgttgaattctgaatcatcttgaaaataagattccaaccacaaaaaaaatttagccatttackamaaawacatttctgtgacaagtatttgtcgtaaattaattttaattgtgtatcaagtgaaaaagaaacactgaggttttaagctgctgtatatagcttgtgagaaacctcttttctttaaaatttacataatcacaagaaaggaaagaattacagttggactgattgtgacagtgccttgtcgtcctctttgaaacaccccgtgttgtccagtataccttataacacttagccacttctccccaccctccagaaggggtccacgttgaattctgaatcatcttgaaaataagattccaaccacaaaaaaaatttagccatttctttactaaaaaaaaccaaaaaacaaatctgttttataatcacagatttttagacaaatttcttgtatcaggaagaaatacaaattttgtcatgtttctcaagcagtttttctgagtagtttctgaggaggaacaaattacaagtgtacccaataactgaaaatgttttaactcactctcatttgtaagcagtccacatagtagacaatgggttttccaagctgggcaaggtacatttaatcagtaaatcagtttcacatcatgtattgtgatgtttcaatgtgagacacaaaaacaatggcttgaaacttgtgtatcatatgtgattttgaaatgaacaccttgaatagcactaatttttatttgtggtatttttctataacaaaacaagtagctctaggaaaagaggttttattttgtaaacgatcatttgtgacctcagacactctctggctaatattttaataagctcacagcagataattctgagatcatgggtgaggggtggtgcatgttgagatttaaattggcataaagctgcatactttttgtctagctgtttgatttcattttttaatatagtatgccaattttgtgactgttaccatgtgaaagtcctgttgaaatgaacaattgtctgccccacaatcaagaatgtatgtgtaaagtgtgaataaatctcatatcaaatgtcaaacttttacatgtgaatgattttctcaaagaacatagaaaagtcaataaaatcctcttaatttccacaaaaaaaaaaaaac

SEQ ID NO: 123 - DNA, 463 bp, Homo sapiens
  misc feature (52): n equals a,t,g, or c
  misc feature (59): n equals a,t,g, or c
  misc feature (262): n equals a,t,g, or c
ctggtatcattgagcccacacatggaggaagcagaactcatcagttcttggngtttcangccatgcctaacttttcccttgagtgcatggcatgttttgttacaggttgtagagtatttgcagaaggaaaccatttctggttatttggctataaaaagtcagcataaaatatgatccaactaaaagggattaatttttggcatttttgtatatttatgcattaggtgatgggacttttaaaggtttgaatttattaggacangaactaaaaataaaagtgcactaggggacagttratttmaatctaagaaaagttaacacttgggraattacaagaagtaaaacaagtgcaactaaatcatttattagttgttttttgaaagcagttttatgtataaataacaaatggttatatttaactaaatgtaaggtacgaattttacatattaaacttttcttcccc

SEQ ID NO: 124 - DNA, 350 bp, Homo sapiens
  misc feature (321): n equals a,t,g, or c
  misc feature (323): n equals a,t,g, or c
  misc feature (341): n equals a,t,g, or c
ggcagagtgatagaagaacttggtgggatcgatagaattraggctttacagctgcatgaraaccgtcaaattggccagtcggctttraacatcatcgagaagcactttggtgagaaaacctccagaagcaacctcctgwactcaaagattaaggaaacagtcaagccaacgaggaaccagccgtcgggtcggggagaaaaaacaacaaawttaagcaatgaaaggtttccaggtcaggaacacctgggggttaggaacaggagcctgcacccaggttaagcagagagttgatgtcttggttttgttttaggagagggggantntttggattaggggggggnaatatttac

SEQ ID NO: 125 - DNA, 1584 bp, Homo sapiens
  misc feature (2): n equals a,t,g, or c
  misc feature (533): n equals a,t,g, or c
  misc feature (1466): n equals a,t,g, or c
  misc feature (1494): n equals a,t,g, or c
  misc feature (1514): n equals a,t,g, or c
antgaccaccagcatcaacgtccctgccgcggcctccaagatctccatgcaggagcttgaggaactgaggaagcagcttggcagcgtggccacaggctccacgctgcagcagtctctggaacttaaaagaaagatgcttcgagacaagcagaacaaaaaaaattcaggccagcacctccccatcttcccagcatgggtgtatgagagacctgccctgatcggggatttcctgattggtgctggcatcagcacagacaccgctttgccgatagsacgttgcccctggcctcgcaggagtcggccgtggtggaggacctgctgtacgtgctggtgggcgtggacgggaggtacgtcagtgctcagcccctggctgggaggcagagccgraccttcctcgtggaccccaacctggacctgtccatcagggagctggtgcacaggatcctcccagtggccgccagctactccgctgtgaccaggttcattgaagagaagtcttccttcgagtacgggcaggtgaaccacgccctggnggccgccatgcgcaccctggtgaaggagcacctgattctggtgtcacagctggagcagctgcacaggcagggcctcctttcgctgcagaagctctggttctacatccagccagccatgcgcaccatggacatcctggcctccctcgccacctcggtggacaaaggcgaatgtcttggggggtccacgctgagcctgctccacgacaggagcttcagctacacaggggacagccaggcgcaggagctatgcctgtacctaaccaaggcggccagtgctccctacttcgaggttctggagaagtggatctacaggggcatcatccacgacccatacagtgagtttatggtcgaggagcacgagctgcggaaggagaggatccaggaggattacaacgacaagtactgggaccagcggtacaccatcgtccagcagcagatcccgtccttcctgcagaaaatggcggacaagatcctcagcacaggaaaatatctaaatgtggtcagagagtgtggccatgacgtcacctgcccggtggctaaagagatcatctacacgttaaaagagcgggcgtatgtggagcagatcgagaaggcgtttaactacgccagcaaggtgctgctggacttcctgatggaggagaaggagctggtggctcacctcaggtccatcaagcgctacttcctcatggaccagggcgacttcttcgtgcacttcatggacctcgcggaggaggagctccggaagccggtggaggacatcacgccccctcgcctggaagcgctcctggagctggcgctgcgcatgagcacggccaacactgaccccttcaaggacgacctcaagatcgacctgatgccccatgacctcatcactcagctcttgcgcgtcctggccatcgagaccaagcaggagaaggcgatggcgcacgcganccccacggagctggcgctgagcggcctnggaggcyttcttctttcgantacatcgtcaagtggcccctttcggttcattcatcmaamaggtgcgggttcggctgcttcggggcaactg

SEQ ID NO: 126 - DNA, 1304 bp, Homo sapiens
cagggcactgagtgattctggatgggcttctgacctggggacaatttaaacagcattacaaccgacattttggttttcttggggattttataggccaggtacaaagcagaaagtgcatagaagatgtgatccactttgcctgggaagagaagctctttctcctggctgatgaggtgtaccaggacaacgtgtactctccagattgcagattccactccttcaagaaggtgctgtacgagatggggcccgagtactccagcaacgtggagctcgcctccttccactccacctccaagggctacatgggcgagtgtggttacagaggaggctacatggaggtgatcaacctgcaccctgagatcaagggccagctggtgaagctgctgtcggtgcgcctgtgccccccagtgtctgggcaggccgccatggacattgtcgtgaaccccccggtggcaggagaggagtcctttgagcaattcagccgagagaaggagtcggtcctgggtaatctggccaaaaaagcaaagctgacggaagacctgtttaaccaagtcccaggaattcactgcaaccccttgcagggggccatgtacgccttccctcggatcttcattcctgccaaagctgtggaggctgctcaggcccatcaaatggctccagacatgttctactgcatgaagctcctggaggagactggcatctgtgtcgtgcccggcagtggctttgggcagagggaaggcacttaccacttcaggatgactatcctccctccagtggagaagctgaaaacggtgctgcagaaggtgaaagacttccacatcaacttcctggagaagtacgcgtgaggacgcctgagccccagcggragacctgtccttggctcttcctcccaatgcccgtcaggctgaactcgcctcccccgtgactctgcctcgggcctcgcagaggccgctggtcacttcgtcatcattttgcccctggagacgtctttctttgtgccttgatgttgagagcgcctctcttttgagcaaacaagcattctatatgcaaccagagtagaggggactgctcagcaggtgtgaccagggttctctgaatctgttattgtttttgcttctggaaagttcatttggggtttacaacaactaggatgtgttgggtgagatgtttcagatctggagaaatgagcaggtgtcgggaaatgtgtgacttaaccgtggtgagggctggaaatccaaactcaccaccatgatctgtgaaataaagcccttagcggtgaaaaaaaaaaaaaaaaaaaaaaaaaa

SEQ ID NO: 127 - DNA, 901 bp, Homo sapiens
  misc feature (598): n equals a,t,g, or c
agcagcgctgcttttttttacagacactgcttttcttacagtcttcgattataagcgccatggctatggctagtgttaaattgcttgccggtgttttaagaaagccagatgcctggattggactctggggtgttctccgagggacaccttcatcatacaaactctgtacttcctggaatcgatacttgtatttttctagtaccaagttacgtgcaccaaattataaaacacttttttataatattttctcactgagactcccagggcttttactatctccagaatgtatttttcctttttccgtaagactcaaaagtaatataaggtctacaaaatctactaaaaagtctctgcaaaaagtagatgaagaggactctgatgaagaaagccatcatgatgagatgagtgagcaggaagaggagcttgaggatgatcctactgtagtcaaaaactataaagacctggaaaaagcagttcagtcttttcggtatgatgttgtcctgaagacggggctagatattgggagaaacaaagtggaagatgctttctacaaaggtgaactcmggctgaatgargaaaaattatggaagaaaagcanaacggtgaaagtgggagatacattggatcttctcattggagaggataaagaagcaggaacagagacagttatgcggattctcttgaaaaaagtgtttgaagagaagactgaaagtgaaaaatacagagtggtgttacggcggtggaaaagtttaaagttgcctaagaagagaatgtctaaataaatggattgctttttagcaatagagctgctttctagtggtaaaggaaggggtcacctgaaaaataggacatttttattaaaataaagttctcttagcgtttgtggaaaaaaaaaaaaaaa

SEQ ID NO: 128 - DNA, 3287 bp, Homo sapiens
  misc feature (46): n equals a,t,g, or c
cttaaacccgggtcgacccgcccgtccggtgctcctcaggagccangccccacccttagaaaagatgttttccatgaggatcgtctgcctggtcctaagtgtggtgggcacagcatggactgcagatagtggtgaaggtgactttctagctgaaggaggaggcgtgcgtggcccaagggttgtggaaagacatcaatctgcctgcaaagattcagactggcccttctgctctgatgaagactggaactacaaatgcccttctggctgcaggatgaaagggttgattgatgaagtcaatcaagattttacaaacagaataaataagctcaaaaattcactatttgaatatcagaagaacaataaggattctcattcgttgaccactaatataatggaaattttgagaggcgatttttcctcagccaataaccgtgataatacctacaaccgagtgtcagaggatctgagaagcagaattgaagtcctgaagcgcaaagtcatagaaaaagtacagcatatccagcttctgcagaaaaatgttagagctcagttggttgatatgaaacgactggaggtggacattgatattaagatccgatcttgtcgagggtcatgcagtagggctttagctcgtgaagtagatctgaaggactatgaagatcagcagaagcaacttgaacaggtcattgccaaagacttacttccctctagagataggcaacacttaccactgataaaaatgaaaccagttccagacttggttcccggaaattttaagagccagcttcagaaggtacccccagagtggaaggcattaacagacatgccgcagatgagaatggagttagagagacctggtggaaatgagattactcgaggaggctccacctcttatggaaccggatcagagacggaaagccccaggaaccctagcagtgctggaarctggaactctgggagctctgggacctggargkactgsaacctggaaacctgggagctctggacctggaagtrctggaagctggaactctgggagctctggaactggaagtactggaaaccaaaaccctgggagccctagacctggtagtaccggaacctggaatcctggcagctctgaacgcggaagtgctgggcactggacctctgagagctctgtatctggtagtactggacaatggcactctgaatctggaagttttaggccagatagcccaggctctgggaacgcgaggcctaacaacccagactggggcacatttgaagaggtgtcaggaaatgtaagtccagggacaaggagagagtaccacacagaaaaactggtcacttctaaaggagataaagagctcaggactggtaaagagaaggtcacctctggtagcacaaccaccacgcgtcgttcatgctctaaaaccgttactaagactgttattggtcctgatggtcacaaagaagttaccaaagaagtggtgacctccgaagatggttctgactgtcccgaggcaatggatttaggcacattgtctggcataggtactctggatgggttccgccataggcaccctgatgaagctgccttcttcgacactgcctcaactggaaaaacattcccaggtttcttctcacctatgttaggagagtttgtcagtgagactgagtctaggggctcagaatctggcatcttcacaaatacaaaggaatccagttctcatcaccctgggatagctgaattcccttcccgtggtaaatcttcaagttacagcaaacaatttactagtagcacgagttacaacagaggagactccacatttgaaagcaagagctataaaatggcagatgaggccggaagtgaagccgatcatgaaggaacacatagcaccaagagaggccatgctaaatctcgccctgtcagaggtatccacacttctcctttggggaagccttccctgtccccctagactaagttaaatatttctgcacagtgttcccatggccccttgcatttccttcttaactctctgttacacgtcattgaaactacacttttttggtctgtttttgtgctagactgtaagttccttggggcagggcctttgtctgtctcatctctgtattcccaaatgcctaacagtacagagccatgactcaataaatacatgttaaatggatgaatgaattcctctgaaactctatttgagcttatttagtcaaattctttcactattcaaagtgtgtgctattagaattgtcacccaactgattaatcacatttttagtatgtgtctcagttgacatttaggtcaggctaaatacaaaaggtaaagcagttgagattctctacaacctaaaaaattcctaggtgctattttcttatcctttgtactgtagctaaatgtacctgagacatattagtctttgaaaaataaagttatgtaaggttttttttatctttaaatagctctgtgggttttaacatttttataaagatataccaagggccattcagtacatcaggaaagtggcagacagaagcttctctctgcaaccttgaagactattggtttgagaacttctcttcccataccacccaaaatcataatgccattggaaagcaaaaagttgttttatccatttgatttgaattgttttaagccaatattttaaggtaaaactcactgaatctaaccatagctgacctttgtagtagaatttacaacttataattacaatgcacaatttataattacaatatgtatttatgtcttttgctatggagcaaatccaggaaggcaagagaaacattctttcctaaatataaatgaaaatctatcctttaaactcttccactagacgttgtaatgcacacttatttttttcccaaggagtaaccaatttctttctaaaacacatttaaaattttaaaactatttatgaatattaaaaaaagacataattcacacattaataaacaatctcccaagtattgatttaacttcatttttctaataatcataaactatattctgtgacatgctaattattattaaatgtaagtcgttagttcgaaagcctctcactaagtatgatctatgctatattcaaaattcaacccatttactttggtcaatatttgatctaagttgcatctttaatcctggtggtcttgccttctgatttttaatttgtatccttttctattaagatatatttgtcattttctcttgaatatgtattaaaatatcccaagcaatccaaaaaaaaaaaaaaaaaaaaaaaaaaaaaaa

SEQ ID NO: 129 - DNA, 1682 bp, Homo sapiens
  misc feature (24): n equals a,t,g, or c
cctcctccctcctccacctctttntcctcctccttccctcctcctccctcctcttcccttctctgccatctttctccccgtgcctattgatcccacataggctcattctgggtacaccggctaaaggctttggtgcattgcagcgttttctcccagcagctgtgtgaaagatgcattttctaagctaaggagaattttctcaagagtggcatactcatgccaaatattattgctctgggccatataggctggtcttcctccacactaaaatgggtgtcttgttttggtacttaaaacagtctactccaggcatccagtccttacagaccaaggaagagcatagcgatgcctgttggaattgcagatgcattctggccttctcccccgtcctgaaacattttctttgaggaaggctcttagaacattagatagtctgctgaggttgttggcccagctccatacacccagtagaacagtggaacaactcatgcttcatgctgccaagctgctgtacttcaaaggaaacagatctagcacactgctgcacccctgcttccacactccacacttcaccccgctgcttttctctgacccgcccctggccttgtaagactcacgtaagctaagtccaggatgcctgtggcctgcggcttgattcttccctttaggattcagcaagttaatggcttcctcgctatagaagtgagactttgacttgatgcctcttggtatatcaaaaagatattcatccagaaagtaccaaatgttctgaaagacccgctcttcactccagttttccctagggtgtttctggcagggcgtttttaaaaggcatctacctgagttgacgctaatacttgtcaccacctggaacgtagttatcggtcggcaggctgaacatactccagattccccagaggccacttctgtagcccagcgatgcatctgagcctctctgcgtggtttatgcttgaaaaatagataatgcttttagatggttcactgccaggccatgggccccacacatctcaggccctgtgtgagggagcacactgagatggtgcaggagtgaatgggcatggcttggcctcgctacctcggggacctgttggagttctggcagcagggtgtctgcaggtgggacggcgttctgggcagagtcagaatggtcagaatgaaacagaacagccaactcacccacaggacagcttattttgaggcaaggttttggattttggaggaagcagccagatgaggcggtgagcctccagaaggtcagcctttggagcacgtaagatactgttacagggtccagaaatcgtgttcacatgggggctttgactcttcaaacagcttttgcagatcgtaaattgcatttgcctagtcgtgtgacctcaaaagaagtcagacatatttaatccagaaatagtttcgtttgagggagggcttgcaggtctgtaaatagcatttgctttcctggttagagattgggatgcagaaggagttttcagtattttttttaaaacactaatgatcattgaagagtatttatgtaaacatacaacgtataatgggtgggggatccgatcatggtgatgtacggggtgaattctcttgccgtgttgcaaatgtgtaaaataaagattatctggcagaaaaaaaaaaaaaaaaaaaaaaaaaat

SEQ ID NO: 130 - DNA, 300 bp, Homo sapiens
  misc feature (300): n equals a,t,g, or c
acccacgcgtccgagtcacaatgccaagcctgacacctaagaaataaccagtgagataggcatcccggatgcttcaatgtcggatatgggcacttcttgctttggcttataaagtgtgggggaagtgatgtgtgacacttcctggcaggagctttcagaaccctagttctagatcgcgagcggccgctctagaggatccaagcttacgtacgcgtgcatgcgacgtcatagctcttctatagtgtcacctaaattcaattcactggccgtcgttttacaacgtgactggttcgaaaaaan

SEQ ID NO: 131 - DNA, 105 bp, Homo sapiens
acagccagcggggctgcgaacctgtccatcagcgtgaaatgtgmcagggcgaggacgcctgrgacttctttggccacaggtcatcctgaactgcaaacctggagg

SEQ ID NO: 132 - DNA, 911 bp, Homo sapiens
  misc feature (63): n equals a,t,g, or c
  misc feature (813): n equals a,t,g, or c
  misc feature (861): n equals a,t,g, or c
  misc feature (885): n equals a,t,g, or c
ggcacagctggcgtccgcgcgctgcacaatggcggctctgaagagttggctgtcgcgcrtaancttcattcttcaggtacagacagtgtttgtgtgttcctgttgtggctaactttaagaagcggtgtttctcagaattgataagaccatggcacaaaactgtgacgattggctttggagtaaccctgtgtgcggttcctattgcacagaaatcagagcctcattcccttagtagtgaagcattgatgaggagagcagtgtctttggtaacagatagcacctctacctttctctctcagaccacatatgcgttgattgaagctattactgaatatactaaggctgtttataccttaacttctctttaccgacaatatacaagtttacttgggaaaatgaattcagaggaggaagatgaagtgtggcaggtgatcataggagccagagctgagatgacttcaaaacaccaagagtacttgaagctggaaaccacttggatgactgcagttggtctttcagagatggcagcagaagctgcatatcaaactggcgcagatcaggcctctataaccgccaggaatcacattcagctggtgaaactgcaggtggaagaggtgcaccagctctcccggaaagcagaaaccaagctggcagaagcacagatagaagagctccgtcagaaaacacaggaggaaggggaggagcgggctgagtcggagcaggaggcctacctgcgtgaggattgagggcctgagcacactgccctgtctccccactcagtggggaaagcaggggcagatgccaccctgcccnagggtttggcatgactgtttgtgcaccgagaagargcggcagttctgnccttgggcaatcaaggggagacgncttttttgagctctgaatgctccctt

SEQ ID NO: 133 - DNA, 3576 bp, Homo sapiens
  misc feature (2657): n equals a,t,g, or c
gacatactatcagaatgttactgagagttaatctgtaaggccctgtaattggggagtaagtgaaaacttcagggttaaataaagagccaactaccgcaaattcagttgaacttcacagctagattctagttggctttttcttctctttcctctagcgtcaaaggaaaatacagaaggatcgcttagtggcagagttcacaacatcactgacaaacttccagaaggtccagaggcaggctgctgagcgagagaaagagtttgttgctcgagtaagagccagttccagagtgtctggcagttttcctgaggacagctcaaaagaaaggaatcttgtatcctgggaaagccaaactcaacctcaagtgcaggtgcaggatgaagaaattacagaggatgacctccgtcttattcatgagagagaatcttctatcaggcaacttgaagctgatattatggatattaatgaaatatttaaagatttgggaatgatgattcatgaacaaggagatgtaatagatagcatagaagccaatgtggaaaatgcagaggtgcacgttcagcaagcaaatcagcagctgtcaagggcagcagattatcagcgcaaatccagaaaaaccctgtgcatcatcattcttatccttgtcattggagttgcgattatcagtctcatcatatggggattgaaccactgaagttataaaggagcacactgtcgcactacattgtctaaattatgtaggaagattcctgtaatcatgtttttttaattattattttaaagctattgtataaaggatggttcccatactttgttatttttattgggggggttggggtggttcctttggattaaatctgatattttctaatactgaaagattttctaaatgtcactgctgacataactcccttggtcttcaatttaatagttgttaagtttttgcccacattgcatatgcctttcatttataatttatttaccctgcttgacttagttttgggaattcgtaaatttaaaggtgtgtgtattctgtttgcatctccctgtcactgtgacacacctagatgygtgktacttcaattaaaattctcaaatttaattttgatttgcttcagmagggaaaatattctcaataatgtaaaataattaaggtctatacatgggttgtatttttctggttcacaacagcacaaagtgtctttcatttttttgttggttttcttttaagatcttttttaccctgaagtcggtgaatacttttctagtttatttgatactctttctgtgtatatattaagcttttgctgtagattgcctagtaaaattactaaggataggttgtttttacatatggtctatttaagtctgatgtttacgggggaaagtgtagttactaaaaatgtttaacataatttggaagaagagtatgaacaaccaataccaatacctattgcgtttggattcttaagaccccagtttgttattccactaaactagttatcttaaccatatcatctggttttgtgggccattatttaccttcccttatgtcttatagaataatggttaatatttttaggtcaaaattacttttggaaagtaactttcccacaattaactgtttttgagcacctgacaaaatttagtgtttaccttgcgtgccattttgtgtcatccttcattaaaaaagcaattggaggtttgccagttatctcacttccctttttaaatcaatgttgttttaatgcactaatctgaattctgtaaagaggattatcttagtttatactttgtattttataatgttcttgtatagcagytcggtactgaaggcggtgtttaacttggcaagctctgagacttcaaatgggaacaaatagtaagtagctaagtaaaccacatctttgcaaccaaaataaagatgagttaaaaggtatctggttaggcctatttcatgaggactatgctctggtgggaccacaggtcacctgatacttagtgctgtgctgcctgaaacctcagcatggagacatcaccacatgcactgtggccattcagcatctttctggagcaccagttcactccaggtttttattttagggtgtcatcgattttacctactttgtcagactggtagaagttgctttgcatatcagaaaaactccatttttttccacaaaaggsattacagaaaactcttttgtgagtgagtgattggaacttagagactcctgttgccagaatcagactgccctagaacagaatggacaatgcagggaggagaattcacacaaacagcacctgttctgaggcctgtgccagcccaccaggcctgctcaaatgtggtctttacttcaagtgcacagaggcacatgaggtttctggtgataaaccagcgtcttaccgctgttttaaagtcccatccccatggctttcacaatcagttccgttttttttgctgtacttgataaaatgtttattctcatacaggtcaagtacatttacttctattcacagtgagtacccaataacaacaaaagcgcttacaaatttggggggcgtgattttagtacctttatttgaagtgtaatcattttaaattattattattttaactggggcagttatcagtggtttaaacaggaactttagtggncttcaattygtttaagaaacatattaagtttgagggaaaaatttcccatgaaatatttggaacgtaagagtagtattgattagagaaaattaaataagaaacatagtatggtagccaaattttttaaaaaatcttgaacttttctgtaggtcagttttagaactgctgtgaaaagtgaaggttgccctgtggagattaaaattagagttgttttcataactgacagcatggtgaatccatttgagtcaaagtgaagaatttcctcatcaagtgactatacatttgtttttgtgtgctcaaaagaaatactcaaacacagactgatattaaccagccaggtaaattgaacgacaatgtggcattaggtatttggctgtttattggtcgttaaatactatggttttgcaatatgattgatggtaaaagagtgatgtcatattgatactagagtagcttgtttttttagtaggtgtgggaccatctcttttacaagtgcaactcagtctaggacagccatggatgcagtgtctggagttggaccctctgagcccgctggctgccccagtagcatctgcattggtgaccaaggacactgcactttgaagaggtcgccactgggttatttagtgtcttcactgcttttgttaaaaattgtaaaattttgtacacaaaaagttgtgtttttgaatatcaattgtttagacacacctacaatgataaataagtgcctttaaaggcccctctttccatgaaatacatctgtggtttagcaaggaaagtacaaaatagtttatgtagttggtataatttttatttgtgtcttcatgtagaaaaaatgaatgtcataataaaatataaaacttacgtaaagaaaawaaagtcattgtccaccttaatagctaaggtccacaagggtaaa

SEQ ID NO: 134 - DNA, 1193 bp, Homo sapiens
gaggtaggcggggcggcgcgtgacctaaggcctctctgccgcrcgmgcagagccaaggcactgatgtttgaactggaaacttcaaaacgtttaataagagtcttcaggatgggtttgaactagacaagctagaaatttctttagaacaccagctctagcatgcatctcccacttttggctttcctggagaggagcttgaagaggtggttctgcagacagccacagtgatactcaggaaaccagaggaatggatttgacttttctgctaggattctttgttatagtttctccctgagttgtaagaggcatggaaatatacatgaaactgaagaacctgcaagraagggaagtggaactttccatgctgagtgaaaactaaccaagtggcagttgtgactgaaaacactgsaaacctaccacgtccagattcactggattgggggatagaggaacggtcacagctagggagaaagaagtgataccggaaaagaaacctaaatkaagagaatgaggatgactgcacagtagatggccacctctacctccacagaggcaaagtcagcctcgtgktggaattatttttttctttatgatggttccaaggtaaaggaagaaggcgatccaacaagagctggcatttgttacttttatccttcccagaccctgctagaccaacaggagttgctttgtggacagattgctggagttgtccgctgtgtttctgacatttctgactctcctcctactcttgttcgtctgagaaaactgaagtttgccataaaagttgatggagattacctttgggtaagttgaatggcagaatcagtgctgaagtgttgcaatgataagtttaggaagttatgttgtttctgagtcttgaatttagaattatctgcccccaccaacctcatccatgtactgtgtttagtaatcaccctcgcttcctgtggtactctctgcaggttttcatcatcaagtgctttccaaaacatttctaacatattctgcattgcacacagctggtttctcctttcctttcaaagacttaggmcaacttgtgggaaattctgtttactctgtgttgtaaattgagtttttatcatcatcttttcttctccatgctctctacacttactgggtaagtgacccagaaaaaaatgatagatatatgttaggttttagagaacccatta

SEQ ID NO: 135 - DNA, 1945 bp, Homo sapiens
  misc feature (72): n equals a,t,g, or c
  misc feature (1832): n equals a,t,g, or c
  misc feature (1836): n equals a,t,g, or c
  misc feature (1854): n equals a,t,g, or c
  misc feature (1918): n equals a,t,g, or c
  misc feature (1924): n equals a,t,g, or c
ggcacgaggacgatttcagctgacagagttaatggcaaccaataatggtggcctgtagctgctaagagcttnacgcaggtttggcctgggmtttcactgttggtgaatttagagtgtccttttaggtggggcggctattctaaaagtgtctttctatcactgttaaggggggcggaaagtgaggttcgaggatgacgtaggtaactctcccctcccaagtccatgttccaagtggctatgtaaagcaagatgatacagaaagctgctctaaaatctcactgagtgatttcaccttcgcctactatgaaatgtctcatcagacctgacatgtctgagataaccaaggtgattcaggatttgatcaaaagaagtctagtaagaattaattacacagaagcctcctttcatttctatgggccaaacaaaggccatggataaccctacccgctttatgtcattacccattgggaaacacaatggctacttctgttagggtacattgaccttggtcaagcatcttaaagaaggcaaccctaattgagagctgtcttggctaatactctgcaccacaattgtgatgtcctagtcctaccactagagggcatggtacagcctggcaaaagttaaaaggggtgtggcagctcccatcaggtctggaggtggtctataagcacagttgacagttgtgcattgggatgggtggagaaagacgacaagagagcagagaatctgctgatgtggctgcgcttacttttagtgactttatgtacttatattaacagctggaaataggttgttgggttttgagcaggctgttatagtgaggaatgttcatttttaaatgttcctaacagattttgcttttgaaaaatgcttgttacatgaataatttgtggaccagggattgcttttctgaaggcagtatagggaacatgaatattcaagatgaaatacaaaaattatgtttaagggtcatagtgtataagtagcttcctaggaaaccctttgtgtatcttttcwgactgggrtgggggctgagcatgcttgtgcagaaagaagccatagccagaaaggacagaatctctcccccactcccttgccccataaccaaacataagctagctagtcttgtctaatagatgggatttactataggtgaagatagccctcatattcaaggacagaagctctggcaggagtaaattagcaaagcagaaatagtaccctttcattcttggaggtgctttgaaattttaggtagaatataatcgaaattatggaggttccttagtgctcaataatataagacctgktgttattagaacgagtctttcttataaactaacagagcaggtatatgcctgttagaycttagctgtggggttcctttactattgggtgaatcattaggtataaaaaataatcatcaaccaggcaaattactttgcttcctagctgatgtcatcccacattggtacaggtgttattcagtactgggtggttcagcagggaagccrggtgggaccagtgtgtctgtcatgaaaccactaactgcattcctgactgaagagccatctgtcatttattggggaaggtcttcagttgagctctcagccttagkaaggaagcacgtggaggagggacggaggaggttcccttgctgggcatgcttcgtagagggccaggagcagcaggtcatgtgcacatgccgttgcagcacaagcttatgcttcccgtagccgtggcttttcattctgcacagtcccaggtcccagctcccctcttatgggtttctgtcataatgtgctttatctgattgactcccaaacatnccgnaatgtcacctgcagattnctcgtgggaaccaatatgtacatggttgcaattatgctgtgagaattaaatggtgtaagatggnaaatgncattggcaggggaataataat

SEQ ID NO: 136 - DNA, 1146 bp, Homo sapiens
  misc feature (130): n equals a,t,g, or c
  misc feature (759): n equals a,t,g, or c
  misc feature (790): n equals a,t,g, or c
aattggcacgagcttagagtcacttctattgcaactcattttctttttccagggcacagatcgaccaagctgccgttccctattctgcaggacaggactattctagcatacctgcttcgtccacccaggncagggtttggggtggtctcttctgtgcctgcagtccccatttgacacttggttgccaccatctttggagattattgtttggaatgatgcttccattggctttttcttgttaccatggactaggaagaaaacatggtttccaaataatctgggagcttttggccatggtgccgccttcctgaattggcagtggtcagagcacacctgaaccctatcctgggctggtgatgagcagaaatcagacctttttctatgcttttttgaatatcagagtaggatgaacacccagattcaaatatgtcaccaaagttggtggtggtccttccctgcacscttgcgttaagccattatgtaatgaaaatgtgtttgcttgaaggaacagctcaaagcaccttcacaagttgccttgacttaccctaggtgggtgtgaaagagcacccgtagcaaggaaaattttctctattagtgtgttcttctgcctcttcccccttgattcagctttcagaggtactatggcagttttgcctcaggtgctgaacatttctcagccctggctaaaagggagcagcacagggagagaaacaggataggaaagcagaatggcgagcagcctatggcccagggcctgtnaatcccttcccaagactagctgctcagggtngtgcagggacaggaccagaccctgcgccyatttcctgscttctttcccctawagggaacyctgtaggctgagccactgtcctgctcttatgacattatatcttgtgcctttctcctcagcagtgagcagtgagctactcctggcccaggccctaggggaaatggatcagtctttgaggtttctatttggggaggggagtacttaaratgagtcaaaagacactttcctctgttccattccccatctcagggactcctgaatattcagctctccaggytggtgtcytmtartttcccccactgggaatgctggtgggaaaagccatgactaccaaactttcctccagctccttggat

SEQ ID NO: 137 - DNA, 2345 bp, Homo sapiens
  misc feature (184): n equals a,t,g, or c
  misc feature (339): n equals a,t,g, or c
  misc feature (1805): n equals a,t,g, or c
  misc feature (1887): n equals a,t,g, or c
  misc feature (2325): n equals a,t,g, or c
  misc feature (2339): n equals a,t,g, or c
tattcgtcgtccagcgaggaggtggaaagcagtgaggacgacgaggaggaaggcgaaggcgggccagcagaggggagcagagatacccytgggggccgcagcgatggggatacagacagcgtcacaccatggtggtccacgacgtcgaggagatcaccgggacccagcccccatacggggcggncaccatggtggtccagcgcacccctgaagaggagcggaacctgctgcatgctgacagcaatgggtacacaaacctgcctgacgtggtccagcccagccactcacccaccgagaacagcaaaggccaaagcccaccctcgaaggatgggagtggtngactaccagtytcgtgggctggtaaaggcccctggcaagagctcgttcacgatgtttgtggatctagggatttaccagcctggaggcagtggggacagcatccccatcacagccctagtgggtggagagggcactcggttcgaccagctgcagtacgacgtgaggaagggttctgtggtcaacgtgaatcccaccaacacccgggcccacagtgagacccctgagatccggaagtacaagaagcgattcaactccgagatcctctgtgcagccctttggggggtcaacctgctggtgggcacggagaacgggctgatgttgctggaccgaagtgggcagggcaaggtgtatggactcattgggcggcgacgcttccagcagatggatgtgctggaggggctcaacctgctcatcaccatctcagggaaaaggaacaaactgcgggtgtattacctgtcctggctccggaacaagattctgcacaatgacccagaagtggagaagaagcagggctggaccaccgtgggggacatggagggctgcgggcactaccgtkttgtgaaatacgagcggattaagttcctggtcatcgccctcaagagctccgtggaggtgtatgcctgggcccccaaaccctaccacaaattcatggccttcaagtcctttgccgacctcccccaccgccctctgctggtcgacctgacagtagaggaggggcagcggctcaaggtcatctatggctccagtgctggcttccatgctgtggatgtcgactcggggaacagctatgacatctacatccctgtgcacatccagagccagatcacgccccatgccatcatcttcctccccaacaccgacggcatggagatgctgctgtgctacgaggacgagggtgtctacgtcaacacgtacgggcgcatcattaaggatgtggtgctgcagtggggggagatgcctacttctgtggcctacatctgctccaaccagataatgggctggggtgagaaagccattgagatccgctctgtggagacgggccacctcgacggggtcttcatgcacaaacgagctcagaggctcaagttcctgtgtgagcggaatgacaaggtgttttttgcctcagtccgctctgggggcagcagccaagtttacttcatgactctgaaccgtaactgcatcatgaactggtgacggggccctgggctggggctgtcccacactggacccagctctccccctgcagccaggcttcccgggccgcccctctttcccctccctgggcttttgcttttactggtttgatttcactggagcctgctgggaacgtgacctctgacccctgatgctttcgtgatcacgtgaccatcctcttccccaacatgtcctcttcccaaaactgtgcctgtccccagcttctggggagggacacagcttccccttcccaggaattgagtgggcctagnccctccccccttttctccatttgagaggagagtgcttggggcttgaaccccttaccccactgctgctgactgggcagggccntggacccctttatttgcacgtcaggggagccggctccccccttgaatgtaccagaccctggggggggtcactgggccctagatttttggggggtcaccagccactccaggggcagggaccatttcttcattttctgaaagcactttaatgattccccttcccccaaactccagggaatggaggggggaccccgccagccaaaacattccccccattcccgacccccmtctcctcttctagcccatgcccttccccggyggagggagggagcagggagccctcactctccacgccccttgcttgcatctgtatatagtgtgagcagcaagtaacccttctcctccctccccccycmcccctcctcaatgtagtggccttggatatcctgtttgttaataaagacaattcaaccagcaaaaaaaaaaaaaaaaaaaawwngggggggggccggntaccaa

SEQ ID NO: 138 - DNA, 731 bp, Homo sapiens
ctaatctctaaccgaaattcagtcttttcttcaactgtgaatgtaggcagcaagcacagtggaacttgcagaacctataaatttgtcactgtgattgatgttataatgttacammtagatcttctttcagaaatgaggacttaccccagctactatgaaagctgttggcagagtgccctcagctggcagccccagggaaatggcctcagttgcagagagccacctcagctgggtaataaacacctggccctctttgattcagggcacttctgaagggtcatataatcttcagaccttctgtaaggttggctgaagcttcctctcagacttcatcacagctcaatgtcatccttctctgaccagttccaccttgccttccctcatgttgatgtcaagagcgttccctagcaaactccccaaatgccaatctccagcttagattctgctttctgggggaaactgaactgtgacagttactaatacaaagratyaatawttttatgtcacattatacttagatagcttgaaatatatatgcatctagttacttaatacattattaaaaaactttttactatatcgaaaattactttttaaacattttagtaactgtatttcaagataattttctgtgttatcctatgccttttattttatgcatcttaaaacatcattctgagaaggacctataggctttatcactgccaaaggagtccatggcaaaaaaaaaa

SEQ ID NO: 139 - DNA, 757 bp, Homo sapiens
  misc feature (734): n equals a,t,g, or c
  misc feature (746): n equals a,t,g, or c
ggcacgagggctcctcgggtccaactggcccgaagtggaggcaggccacccaggacccccaggccccccgggcccccgggagaggtcatccagcccctgccaatccaggcatccaggacgcggcggaacatcgacgccagccagctgctggacgacgggaatggcgagaactacgtggactacgcggacggcatggaagagatcttcggctctctcaactctctgaagctggagattgagcagatgaaacggcccctgggcacgcagcagaaccccgcccgcacctgcaaggacctgcagctctgccaccccgacttcccagatggtgaatactgggtcgatcctaaccaaggatgctccagggattccttcaaggtttactgcaacttcacagccggggggtcgacatgcgtcttccctgacaagaagtccgaagggccagaatcacttcttggcccaaagaaaacccgggctcctggttcagtgaattcaagcgtgggaaactgctctcctatgtggacgccgagggcaaccctgtgggtgtggtacagatgaccttcctgcggctgctgagcgcctytgcccaccagaacgtcacctaccactgctaccagtcagtggcctggcaggacgcagccacgggcagctacgacaaggccctccgyttcctgggctccaacgacgaggagatgtcctatgacaacaacccctacatccgcgccctggtggacggntgtgctaccaanaaaggctacca

SEQ ID NO: 140 - DNA, 663 bp, Homo sapiens
  misc feature (558): n equals a,t,g, or c
  misc feature (646): n equals a,t,g, or c
ggcgaacctgaggaggaagaaacggggctagcgcgcaggcccagaacggtccgagccgcggcagtcggcgacgcctccagagcggaagagggaagtgaatcaggcgccgggtagtgggttgctgggctgggcttgctgaggtagaggcagcgccaagaagaggcctttgccgctggtcgggattgggatgtcgaagaacacagtgtcgtcggcccgcttccggaaggtggacgtggatgaatatgacgagaacaagttcgtggacgaagaagatgggggcgacggccaggccgggcccgacgagggcgaggtggactcctgcctgcggcaatatccttgcattcaccgccctccccaccccagcccagcccagcccgcccttctcctgggacccgggagcctgcaggatccgcggggcaccggcgcggagctgccctctcaacctgcggcttaacctgtctctttgggatcgcccgctctgagagggcaagggggaagcccccgtttcctacccagtcggcaggagacgcgagggtcccactcttggaagcctgcctnccccgcgcgccttcacgcccccagattctcaggttgacccgagtgcctgcctggctcgggaactggtcccggcgggcgcgccctcgcngcgctgggggaaagcgg

SEQ ID NO: 141 - DNA, 3935 bp, Homo sapiens
  misc feature (43): n equals a,t,g, or c
  misc feature (68): n equals a,t,g, or c
  misc feature (1010): n equals a,t,g, or c
  misc feature (1595): n equals a,t,g, or c
cccctgaataaataacgaacccctgtaatcaaaccctcttttncaaactcctgtgaactcccttcaanggatggcaaacctttcctaaacaatgaatggtgcctactgccttcccagaaccctggagtctccccttgcccagaatgaaatgaacagaattcaagaagctgagtaaggggaaaagcctgttgggggccttcatacctcggtgtaatgrggagggctattacaaagccacacagtgccacggcagcacggggcagtgctggtgtgtggacaaatatgggaatgagttggctggctccaggaaacagggtgctgtgagctgtgaagaggagcaggaaacctcaggggattttggcagtggtgggtccgtggtcctgctggatgacctagaatatgaacgggagctgggaccaaaggacaaagaggggaagctgagggtgcacacccgagccgtgacagaggatgatgaggatgaggatgatgacaaagaggatgaggtcgggtacatatggtagtgcccacaagaaagaggacacaagttttgcacaaaattgcaagtcacttcctattcctgcatttgtatctaagactccaaggcaccaaggtctcttctccattgttgctctctatacccgacctaaggtttggaagacaactgcttgttcccagaggattctgattttgcatatgtttgtatgggagaaagggtgttgtgtttttttttttgttgttgtttattttttggatagggaagtcattggcttaattagagcctccttcctttctgtgagatttttccaacaagcatgtgatttacgtggaattctgacagtgcagggagcccccaccctcttaaatgtcaaagaccctttttgattacccacactggtggttattacagcatggttcccagccttacagtgtctaagtgcttctcttgtgtcctgtagatgttgtgaaaaagaaaaaaacaaaaaatacaccacactgtactttttcccccntgccccccgttactgccggtgattattattaaaaattagtttttttcacatcattatatctggcttcctataaacaacagccttaattcagtcaagactccctttggggaattcattttattaaaaattggtgtctggatacttcccygtacatgcataaatatgcatgcatgtacagaaagactgtatgtgtgtgccttgcacacacacccatacctctcagaaaaagtgggtatcttaaaaactcgaaaaacaatgataaatttctcagcttgtccagacctggaacaaaatttctggaataagaaatttgtattaaagtccttttttgcactaacagttggctcttgtagcctgcaggctgaggaagtctcttctctgtgcatcagcagagttactgaaagcctctgattgagaaaaaacctccgtctgcctaaatcacttttctcgcagaagccatgcgactcccacacgacacgggcagcttcacaagccatctctttcatttctgcttgaagcccccttggctgcagcaatcctgtctgccataggtttcttccttccttacctactcaagggcttttnctaaggcatgcacacatatctcctgttctctgagagtaccatggtgttccttaaaagaagaaaatttctaattctgaactcaatgttttgcttttactccctttctactgacaaatcatgataagggcacaaaagctgtacagatttttttttttaaccactcaatcccaaatggaggcctacaaagaacatcgtaataacacatggaagcaaacccygggtttttaagagcaaattctgtcccccctcactcccccaagtgacaagatactaatgaagaaagttcttcaccatagtgtttgttttaactaaactcattggagtctagttccaaatttggtagggtcatcatctctacattccttaggatttctctccctatcaagctggcccagatacaagtaccaaacagtagtctctgaagttcccccatttccttcagtaccagtctataagctactgtccgccactgattttcatctatcagggtgtcctaatcagaatcagccacccaagcaagcctctctggcccacatatctatctcttgccttcccccatgaacttcagcctgtccacacaaaagccacataaactcaagcaagaaatatgttcagccaaaacatgattatagtggcagctgaccaatcccccatcccaaattgaccatttagatgtaccaactcaccttaaattagcatgttccaatccagtcggcattgcctgaatacagtagcatcatacctatagttggtcttagataagaaatgaactacttgatatagcaaagtcctttggcttcgtaaataaccctgaggttttgtacttactttccccataggaagacagaccataggcaaactctgttttgggatctcaactccatcacctttgtttcaatattttttttctctcttgaacaaaactgagataatttagaaaacaggtgcttaattgcaataaaattactatgaagtatattaaaaatcacgacattgtaaaatctcactttagatcatcaaagaaaaccattgttactatctcctttgagcttaggaaaatgtacaagagaacaaattaaaattgaaaaattgatttcacttagaaaaacttctaggaacagggtgaaccactgattttaatttgcctaattatcttatgacaagtatcaaattaagatgacacttaaagatccttagcattaacttaatgatggagaagagtgctcaayagacagttcccagtaaggtaatgagatgccattttcagagacattctaagaagatattttgattcattaaaacattaaataaaaagccctcctcagattggaacccccaaatcgatggagccacattaataatacttttcatgcctcactttgacatgacagcattcgatttttttaaagatctttaatactttccatgagtactaaagattgtaatgagttaccttatccttagaagtagaatgtttgctttcttcttcttggaaatrgtcctccaaaaagtccacttgtaccagtgacaagaagtcacttgtatagtgaccaagtacacataaaatactgattataaaaatattgtaataaaccacttcctcatttgatacaggtattaagctgaatcctcactaattcacttttgaaaagttcttaatgaacagttttattcttattccatgaacagctcttttaatacaatttccttggtatccaacttaaatcccagaattttgttccaccatggttagttatttgccatatgaatgtattcttgtttctaccaatattctaggcatgagaataccttaatactgagttggagattttgtatctgtttctcctcctttacgcccattttcctacccacagcagcaaatgacaacgtgtctgtccaggtctgtccccctgctcatcccaggatgccactcacatttttttcttcttgttaccttgaccacgctgtacagtaacatccaagagcccattctacagtgggtggttttggtctttttataactttttctcaaagtcactgatgtttgttcctgttaaatgtatagcattgtaatgagagcccatcaaatcctgagtgtcagtttgttgtccctattgtagatgaaatagtgatgtagcaaaaacctagtaaattctgaatgcttttccacgtagacttatctggaatgtgaacacaactctttggttaatagtaaatgcttaactgtagtcctgagtaggtgcatttctgtctgtctcaataaattttactttgtctgcaaaaaaaawaaaaaaaaactggaggggggcccggtacccaaatcgccggatatgatcgtaa

SEQ ID NO: 142 - DNA, 2212 bp, Homo sapiens
cgccgccgcctaaggggggctggggccggggccagccatcactgccgttgccgggatgccgcgggtgtacatcggccgcctgagctaccaggcccgggagcgcgatgtggagcgcttctttaagggctacgggaagatcctggaggtggatctgaagaacggatatggttttgtggagtttgatgatctgcgtgatgcagatgatgctgtttatgaactgaatggcaaagacctttgtggtgagcgagtaattgttgagcatgcccgcggcccacggcgagatggcagttacggttctggacgcatggatatggttatagaagaagtggccgagataaatatggccctcctactcgcacagagtacagacttattgtggagaatttgtcaagtcggtgcagctggcaagacctaaaggattatatgcgtcaggcaggagaagtgacttatgcagatgctcacaagggacgcaaaaatgaaggggtgattgaatttgtatcttattctgatatgaaaagagctttggaaaagttggatggaactgaagtcaatgggagaaaaatcagattagttgaagacaagccaggttccagacgacgccggtcctactccagaagccggagtcattcaaggtctcgctctcgaagcagacattcccgtaagagcagaagccgaagtggcagcagcaaaagcagtcattctaagagtagatctcggtccaggtcgggctcccgctcccggagcaagagccggagccggagccagagtcggagccggagcaagaaagagaaaagcaggagccccagcaaggacaagagccgcagccgcagccatagcgctggcaagagccgcagcaagagcaaagaccaagctgaagagaagatccaaaacaatgacaatgtcgggaaacccaagagccggagtcctagcaggcataaaagtaagagcaaaagtcggagcaggagtcaggagaggagagtggaggaggagaagcgagggagtgtgagcaggggcaggagccaggagaagagcctccgccagagtcggagccggagcaggagcaaagcggggcagcaggagccggagcaggagccgcagcaagagcaaggacaagaggaagagcaggaagagaagcagagaggagagccgcagtcgcagtcgcagccgcagcaagagtgagaggagcagaaagcgaggcagcaagcgagacagcaaggcgrgcagcagcaagaagaagaagaaggaagacactgaccgctcccagtccagatctccatcccgctccgtgtcaaaggagcggaacatgccaagtctgaatccagccagagggaaggtcgaggagagagtgagaatgctggcaccaatcaggagacccggtccaggtcgagatccaattccaaatcgaaaccaaaccttccatcagaatcacgctccagatcaaagtcagcttcaaaaacccgatctcggtccaagtctagatccaggtctgcttccagatcgccctcccgatctagatctaggtcccactcaaggtcctaactggctatggccacagctggaactacccgagaagtcttttgtacatgtttggtagccgtagcacaagtgattggagtagaacatgtcactgctgtacatttttaactcccctaatggtgtgtctataattgttaaatctaagtgcttcctctcagtaaagcctcctggcaccaggccttcctgctcgactgaaaaaaattttctctttgaaaatccccttttactcatggcccacagtagaatatccaaaacgccttggctttcaggcctggcctttcctacagggagctcagtaacctggacggctctaaggctggaatgaccacataggtaggtatggtgagttcaaccatttttgctcttgaattgatgcccttcgatgtatgccatttagtgaaagtgctaagtcttaagtttcctaccactttggtttcatatttttggacttaacaaagttgtgaatagcacagtcgaggaaaattgatacctgcagtaacccataggaaataaactgtagagttccatattctggtattgtgattatattgttttatattaaaaaagaaaagaaaagaattttttttaattttatttttccccgtcttgcaaagtatagtgacccctgtttccattaaatttgaataaagactatttttgcttgacaaaaaaaaaa

SEQ ID NO: 143 - DNA, 743 bp, Homo sapiens
  misc feature (412): n equals a,t,g, or c
  misc feature (742): n equals a,t,g, or c
agaaacctagtctggattgggtcggaagctggaatttggtgctctgcagaccagtgctcaaaattgtggttatttttgaggactcgccttcaatccagaacatttgcgtttcaccttcctcgcccagatccagttaacaaggtagctcatcacttcttgcatctgttgagtgacatgctggattttaatttttattgtggttgtacttggatgcaaggaaatatgttttgttcctcccaatttagcgcaccatcctgggaaagtgcatgtytcaraccaactccaccttcaccttcaccacctgtcgcatcctgcatccttcagatgagctcactcgggtcacaccwagccttaactcagccccaactccagcttgtggcagcaccagccacttgaaatccacgccggtggncacaccatgcactccacggagactgagcctggctgagtccttcactaacacccgtgagtccacgaccaccatgagcacatccctggggctcgtgtggctgttgaaggagcggggcatttctgctgccgtgtacgacccccagagctgggacagggccggccggggctccctcctgcactcctacacgcccaagatggctgtgatcccctctactccgccgaactcgcctatgcagacacccacatcctccccaccctcctttgagttcaagtgcacgagccctccctacgacaatttcctggcttccaagccacgcagactccatcctgna

SEQ ID NO: 144 - DNA, 839 bp, Homo sapiens
  misc feature (768): n equals a,t,g, or c
  misc feature (812): n equals a,t,g, or c
accggtccggaattcccgsgtcgacccacgcgtccggcgagagacgtcgccagggacccagggacctctccctccagttccccgggcccgcccggccctgatggccactcacgctatagcgcccactctgtcctgggccatcccgcgccagcagtgtagcccccagcccgggcgcctgaatgctctccctccggatcgctgctcgggtccccactttggcgaccgtgcccccgagtcctgcttccccggggcctgctctgtatcaggcgcctgcgccttcaagggtacccggcccgcctgccctccccaagagccgagtttgcgctcctcccggaatcgtttgagagaaggacaaacttttggcaggatggaaatctagatgagcctgtccggagcagaacacccctgattagccaggcccamcgscatccacatctgctcggcaaagaaggaaggcagcttgttccagaccttggtgagcagctgcagactgcctgcctagaacagcctccttactccagcctggcagggaaggaaggaacctgacttgcttcgcaggatctggaagctcagccggcagagtgagagccgcagttgcatcctggagcctgatgctagaagcagctttcgtctttgggttcttgctgcctcggsctctgctctgttcagtttgctgttgkgtttttttccccatgtttgggtggtggggtacagggaataaaatgctttttccagggccttaatcctttcccatggcttcatcagctnaaagtgctgacatcatgaattgactttcagcctggccataagtntttaaggaattcaaatttttttggcag

SEQ ID NO: 145 - DNA, 2907 bp, Homo sapiens
  misc feature (2882): n equals a,t,g, or c
  misc feature (2884): n equals a,t,g, or c
  misc feature (2903): n equals a,t,g, or c
tccccgagatagtcagaaaaactttgtggtatccagtcaccaaaaagaaggtcagttacgtgcagctgaaggaacggtgcagaatcgaaccacatactggtctgctcttgctttcagtacagaagagaagcatgtccttccaaggaatcagacaacctgtgaccgtcactgagctagtagattctggtatattgagaccgtccactgtcaatgaactggaatctggtcagatttcttatgacgaggttggtgagagaattaaggacttcctccagggttcaagctgcatagcaggcatatacaatgagaccacaaaacagaagcttggcatttatgaggccatgaaaattggcttagtccgacctggtactgctctggagttgctggaarccaagcagctactggctttayagtggatcctgttagcaacttgaggttaccagtggaggaagcctacaagagaggtctggtggscattgagttcaaagagaagctcctgtctgcagawcgagctgtcactgggtataatgatcctgaaacaggaaacatcatctctttgttccaagccatgaataaggaactcatcgaaaagggccacggtattcgcttattagaagcacagatcgcaacyggggggatcattgacccaaaggagagccatcgtttaccagttgacatagcatataagaggggctatttcaatgaggaactcagtgagattctctcagatccaagtgatgataccaaaggattttttgaccccaacactgaagaaaatcttacctatctgcaactaaaagaaagatgcattaaggatgaggaaacagggctctgtcttctgcctctgaaagaaaagaagaaacaggtgcagacatcacaaaagaataccctcaggaagcgtagagtggtcatagttgacccagaaaccaataaagaaatgtctgttcaggaggcctacaagaagggcctaattgattatgaaaccttcaaagaactgtgtgagcaggaatgtgaatgggaagaaataaccatcacgggatcagatggctccaccagggtggtcctggtagatagaaagacaggcagtcagtatgatattcaagatgctattgacaagggccttgttgacaggaagttctttgatcagtaccgatccggcagcctcagcctcactcaatttgctgacatgatctccttgaaaaatggtgtcggcaccagcagcagcatgggcagtggtgtcagcgatgatgtttttagcagctcccgacatgaatcagtaagtaagatttccaccatatccagcgtcaggaatttaaccataaggagcagctctttttcagacaccctggaagaatcgagccccattgcagccatctttgacacagaaaacctggagaaaatctccattacagaaggtatagagcggggcatcgttgacagcatcacgggtcagaggcttctggaggctcaggcctgcacaggtggcatcatccacccaaccacgggccagaagctgtcacttcaggacgcagtctcccagggtgtgattgaccaagacatggccaccaggctgaagcctgctcagaaagccttcataggcttcgagggtgtgaagggaaagaagaagatgtcagcagcagaggcagtgaaagaaaaatggctcccgtatgaggctggccagcgcttcctggagttccagtacctcacgggaggtcttgttgacccggaagtgcatgggaggataagcaccgaagaagccatccggaaggggttcatagatggccgcgccgcacagaggctgcaagacaccagcagctatgccaaaatcctgacctgccccaaaaccaaattaaaaatatcctataaggatgccataaatcgctccatggtagaagatatcactgggctgcgccttctggaagccgcctccgtgtcgtccaagggcttacccagcccttacaacatgtcttcggctccggggtcccgctmcggctcccgctcgggatctcgctccggatctcgctccgggtcccgcagtgggtcccggagaggaagctttgacgccacagggaattcttcctactcttattcctactcatttagcagtagttctattgggcactagtagtcagttgggagtggttgctataccttgacttcatttatatgaatttccactttattaaataatagaaaagaaaatcccggtgcttgcagtagagtgataggacattctatgcttacagaaaatatagccatgattgaaatcaaatagtaaaggctgttctggctttttatcttcttagctcatcttaaataagcagtacacttggatgcagtgcgtctgaagtgctaatcagttgtaacaatagcacaaatcgaacttaggatttgtttcttctcttctgtgtttcgatttttgatcaattctttaattttggaagcctataatacagttttctattcttggagataaaaattaaatggatcactgatattttagtcattctgcttctcatctaaatatttccatattctgtattaggagaaaattaccctcccagcaccagcccccctctcaaacccccaacccaaaaccaagcattttggaatgagtctcctttagtttcagagtgtggattgtataacccatatactcttcgatgtacttgtttggtttggtattaatttgactgtgcatgacagcggcaatcttttctttggtcaaagttttctgtttattttgcttgtcatattcgatgtactttaaggtgtctttatgaagtttgctattctggcaataaacttttagacttttgaaaaaaaaaaaaaaaaaaaaaaaaaaaaaaaaaaaaaaaaaaaaaaaaaaaaaaaaaaaaaancncccgggggggggggggggncccc

SEQ ID NO: 146 - DNA, 1837 bp, Homo sapiens
  misc feature (269): n equals a,t,g, or c
  misc feature (1612): n equals a,t,g, or c
  misc feature (1757): n equals a,t,g, or c
  misc feature (1790): n equals a,t,g, or c
ggcagagctacagaggcagggaagggccacaatgtccaggtaggccccaacagtttctcttgtctggcaggtcttctattactccacgagcatcttcgagaaggcgggggtgcagcagcctgtgtatgccaccattggctccggtatcgtcaacacggccttcactgtcgtgtcgctgtttgtggtggagcgagcaggccggcggaccctgcacctcataggcctcgctggcatggcgggttgtgccatactcatgaccatcgcgctancactgctggagcagctaccctggatgtcctatctgagcatcgtggccatctttggctttgtggccttctttgaagtgggtcctggccccatcccatggttcatcgtggctgaactcttcagccagggtccacgtccagctgccattgccgttgcaggcttctccaactggacctcaaatttcattgtgggcatgtgcttccagtatgtggagcaactgtgtggtccctacgtcttcatcatcttcactgtgctcctggttctgttcttcatcttcacctacttcaaagttcctgagactaaaggccggaccttcgatgagatcgcttccggcttccggcaggggggagccagccaaagtgacaagacacccgaggagctgttccatcccctgggggctgattcccaagtgtgagtcgccccagatcaccagcccggcctgctcccagcagccctaaggatctctcaggagcacaggcagctggatgagacttccaaacctgacagatgtcagccgagccgggcctggggctcctttctccagccagcaatgatgtccagaagaatattcaggacttaacggctccaggattttaacaaaagcaagactgttgctcaaatctattcagacaagcaacaggttttataatttttttattactgattttgttatttttatatcagcctgagtctcctgtgcccacatcccaggcttcaccctgaatggttccatgcctgagggtggagactaagccctgtcgagacacttgccttcttcacccagctaatctgtagggctggacctatgtcctaaggacacactaatcgaactatgaactacaaagcttctatcccaggaggtggctatggccacccgttctgctggcctggatctccccactctaggggtcaggctccattaggatttgccccttcccatctcttcctacccaaccactcaaattaatctttctttacctgagaccagttgggagcactggagtgcagggaggagaggggaagggccagtctgggctgccgggttctagtctcctttgcactgagggccacactattaccatgagaagagggcctgtgggagcctgcaaactcactgctcaagaagacatggagactcctgccctgttgtgtatagatgcaagatatttatatatatttttggttgtcaatattaaatacagacactaagttatagtatatctggacaagccaacttgtaaatacaccacctcactcctgttacttacctaaacagatataaatggctggtttttagaaaaaaaaaaaaaaaaaaaaaaaaaaaaaaaaaaaaaagggcggccgntctagaggatccaagcttacgtacgcgtgcatgcgacgtcatagctcttctatagtgtcacctaaattcaattcactggccgtcgttttacaacgtcgtgactgggaaaaccctggcgttacccaacttaatcgccttgcagcanatccccctttcgccagctggcgtaatagcgaanaggcccgcaccgatcgcccttcccaacagttgcgcagcctgaatggc

SEQ ID NO: 147 - DNA, 1371 bp, Homo sapiens
aattcccgggtcgacccacgcgtccgctgctgttcgggacgttgctgatgaatgccggggcggtgctgaactttaagctgaaaaagaaggacacgcagggctttggggaggagtccagggagcccagcacaggtgacaacatccgggaattcttgctgagcctcagatactttcgaatcttcatcgccctgtggaacatcttcatgatgttctgcatgattgtgctgttcggctcttgaatcccagcgatgaaaccaggaactcactttcccgggatgccgagtctccattcctccattcctgatgacttcaagaatgtttttgaccagaaaaccgacaaccttcccagaaagtccaagctcgtggtgggtggaaaagtgttcgccgaggtgtgcatggtttcccagccacgtccctgttttcaaagatagtttcactttggtctctgaattgaaatgctgtctactgaaagggtttcaggagcgtttatgtaaggggctgtgatgaaattgcattccccatagataaaagaaaaatcatttctatccagagatctgagcagaaggattggcttgttagtttaacacagccgtatttttggacattcagtgttacttgctgagtctgacagcctctgggcccggccaggggccctgttaacaaactgctttcacatcccaacagggtctgcttggccactcagtgcagctgcgattaaccctaaaggctttaaggaacgggccacctgtaacagagacaccagccttcctgtatagacactaaattgttagcaagagtgttgagctagttcctggtgaagtgtttccacagaagacatgtggagcagttgtggggatattaagggaaactttcctctgccttgacccctttgttaaataaaatgactttgggagccattcattgtacagttgcaggaatgagagtgattttatgatgtggtacattgggaccatgttctaaaaccttgggtttctgagtctgctttttgagtaggtgattttgaggttgaaaaaccaggggccttcatctaggaaatacagcattttccagaagcttctttgaaagggaatcctggttttgttgccaaaatgaaacgcccggggttggcgctgaatcccacaactgtgtgatttgcttgttgagttttttgttgtctggtttttttgtttgtttgtttataccaataagaatgagcctgaatgttggtggtttttgaaatcctgacttggaggtaaacctggaggaaggaaaaaaagtaaatatgcaggcttttaggactgagtagccttgaaaataaacctcatttctaaaaaggaaaaaaaaaaaaaaaaaaaaaaaaaaaaagggggg

SEQ ID NO: 148 - DNA, 1757 bp, Homo sapiens
cgacaaactttgggcgtagaatggaagccactgccagcctctgtgctgagaaggaaggtgcttgtttcaaagggagcagcaagggaggcttgttctactcacctgggcctgtttgcctgagaaggggagataagggctgaactgggactagccagggggaccaacacaaatggtgggggatcatgacctgaaggattctttccttcccatgagctgcagggctggttgccgtccttgcaactgtgtcttatttgcctgtgccgttatatcttggtgacccctccasgtgtacaytactgacaaacgggtggagtgctggggagaagtcactgtgccgcccacctagtaaaccttctgtctgtgctcatggcatctccaagatggggcactgctgtgtgcagaatccagggtcctctttctgcttgcaactcctttccctggatgccccagaaacaatccaggcctcctttcctatcttacccctttgctttgctttttaccccagcacctctataaccgccttctcttcttttcagaactccttgtttctcrtcctgttttttatgattacaaaactcttgcttccaccctggaagataactgctatagatgcctgtatgtaaatggtgctgtctccagcaactggcatgctgaagaagaattgattcacggggtataaatgttggggattggaagtggggatgaaatggcacttgttgatacaggagcagagaggtgaggccgactgctgaagacagctcgccaccctccttgcctccactccaatccaggggctggggccacattctttgccttcatttatcctcagatcaggtgagatcgacaggaggtgttgatggcagtgccagcaattattgctaatccgtttgcatccttatgcatagatctgaattcagactttgtgaatttccagaggtgtgggtaatataatagaattcagtgagtgggcatggctgatcttgtgcaaattaaaagttatggggcataagaatagcaaaagttgaacttcttttaaaaaggaaagtaccctgagagccagtattggttgaggctcttcagtatgcccaggttggcagcactgagaaccgcagaaacggcctgttgttacaaaaaggagattgactcagctgcccttggtgcatctgactgactatgactgctgagagattccaaggacccttaatgccagggctaacctctccatgtgcagtgagacctctggaggaagtgtcatcctctggctttgtgtggtactcattatggtgcagtgcgggcatgaaatgaagacacccaaataggcttacagatacgatatgttttaaatgttcgtatttaacaaaaacatactgacactgtttggaaatggcaacaggaagatagcaaaatgaatactaacattacgaaaagatgaacaggtacatgttccaaggcaggtggctgtgaacttcctctgagtgaaggcatcccctccagcacctttcagcctgctagttaggacgacccgccgccaccctccaggacctccagccctgcactgcctttcctctcttttaaataattcttcattgagttctaatatgtaaaaaaaaaaargtttactgtaaagtttgcaaataaggaaattttttttaaaagtcctcagtaatcttaccagtaacaattgttatgggcacatttgcttttggaagatttcttttgtatgcatgggaataagtacatttttaaacaaaaatggg

SEQ ID NO: 149 - DNA, 3532 bp, Homo sapiens
  misc feature (3276): n equals a,t,g, or c
aattcggcacmgcggcgagaggcatgggcacgtggctgccgagggtggccgagctctgggaagaaaagcccgtgtgcctctgcatagcgtcgctacagcgctgactcggtgtggattgattggaaaggtttgagggagtacttgggaagcatggtggcacatgatgagactggaggtctcctacctattaaaaggaccatacgagtcctagatgtcaataaccagtccttcagagaacaagaggagccaagcaataaaagagttcgacctctggctcgtgtcacgtccttggcaaatttaatctctcctgtaagaaatggagctgtcagacgttttggtcaaacaatacagtcatttacccttcgtggtgaccacagatccccagcctctgcccagaagttttctagcaggtcaacagtcccaacacccgccaagagaaggagcagtgcactgtggtcagagatgctggacatcaccatgaaggagtctctcaccaccagggagatcagacggcaggaggcaatatatgaaatgtcccgaggtgaacaggatttaattgaggatctcaaacttgcaagaaaggcctaccatgaccccatgttaaagttgtccatcatgtcagaagaggaactcacacatatatttggtgatctggactcttacatacctctgcatgaagatttgttgacaagaataggagaagcaaccaagcctgatggaacagtggagcagattggtcacattctcgtgagctggttaccgcgcttgaatgcctacagaggttactgtagtaaccagctggcagccaaagctcttcttgatcaaaagaaacaggatccaagagtccaagacttcctccagcgatgtctcgagtctcccttcagtcgaaaactagatctttggagtttcctagatatccctcgaagtcgcctagtcaaataccctttactgttaaaagaaattcttaaacacactccaaaagagcaccctgatgttcagcttctggaggatgctatattgataatacagggagtcctctctgatatcaacttgaagaaaggtgaatccgagtgccagtattacatcgacaagctggagtacctggatgaaaagcagagggaccccagaatcgaagcgagcaaagtgctgctgtgccatggggagctgcggacaagagtggacataaactttacattttcctgtttcaagacatcttggttctgactcggcccgtcacacggaacgaacggcactcttaccaggtttaccggcagccaatcccagtccaagagctagtcctagaagacctgcaggatggagatgtgagaatgggaggctcctttcgaggagctttcagtaactcagagaaagctaaaaatatctttagaattcgcttccatgacccctctccagcccagtctcacactctgcaagccaatgacgtgttccacaagcagcagtggttcaactgtattcgagcggccattgcccccttccagtcggcaggcagtccacctgagctgcagggcctgccggagctgcacgaagagtgtgaggggaaccacccctctgcgaggaaactcacagcccagaggagggcatccacagtttccagtgttactcaggtagaagttgatgaaaacgcttacagatgtggctctggcatgcagatggcagaggacagcaagagcttaaagacacaccagacacagcccggcatccgaagagcgagggacaaagccctttctggtggcaaacggaaagagactttggtgtagagaaggctctgtgtgttactgatgggagagactgtttgtttataaatgtgtacagttttgttttctcgtaaggggagcatcatagggttactttataccagttgtaacattttcattgtttttggttgttcttttttctttttttaatggcagctaaagatatacagattactgttaaattgcagtccttttttttttaaagatattttcttgagttatttagaacatggtaagcctggtattttttaatcaaacaaaatatttatgaaatgggttttctcttaattctggattcatcatggctttctaataccaattgtaatatttacaatattcaccaaaacttagaattttgcaaatgctggaattctgccagtgtttctttgctaagccttgcatgcaaaatttgaaattttaacattggcacccaaaacctacatggaatgtatgtctggagtatttcaaactttacattgaaacataatttccttggaaaacaaaccataagcctgaggaggtttttatcaactggaatgctttatattagtttgtttttcactgtacattcctcattttacattcatttaacctgccgattatttaatttttttattgtaaagtagtttttagcatttgcttttatttttttactttgatgccttttcaaattggcatgtctttaaagtatttttcttcctgattaaaaatgtgtgtgtatgtgtgtgtgtgtgtgtatatatatatatttttttaaatcacattaattttaccaagtgaaaccaagccatactgtttttgagccaattaagaaaattgccatttttaaagtgtagcatttcagggtaaagacccatgaaatggcttgatgtattctagactactgaaagaaaaccacttcaaagattttgttgaaagttttagtgttgtctgaaatgcaagagggaaggtgattggtagtgagttaaaagaaaaagagaggaaaagagagtagttttgtcttcaagtaaaatgtctggttgtgccagacatttcacaagtgtgaaaggagataggagaagctcaacttgagggcgtgtagtaagttgtagaaggctcgaggggacgtggacttatttgccttggtttgcaatacctgcaaataatgagtttgaaaagaaacaatgaaatgtgttaaaaatttgaccatattagataaattttggtggatttagtcataagatggaaaaagactggtgaatcttttattacaaaatgtttctgttaaaatgggatcatcatctttgaaaggggggaggaggagtaaaagcccgattataatggtgatcaattcaagtcagtgttgactattctgtgaaatatatttggccagtggaaatgataatcagaaaagactgtaaatagatccatccaaatgatttctctgtacaaatgaatgatactattaaaaaaaaaaaaagcacacacataatcaccctgaaggtttcttgcctggtggctnctattgttgggggcatttggcaaaatatgctggtgtggcaaaggaggtagtggtaagcctcataaaagttagtaaaaattgtagttcaacctttgaaatcattgatgaatcagcgaaaggtaggtaagtcttgtgttaggaaatcttttaagaacatggtgtaatccagacacagcaattggtattgaaaataactgaacacctggtaccttcctggataggatagtaagggtagtagtggcaaggatcctgatta

SEQ ID NO: 150 - DNA, 1931 bp, Homo sapiens
  misc feature (311): n equals a,t,g, or c
  misc feature (314): n equals a,t,g, or c
  misc feature (1859): n equals a,t,g, or c
  misc feature (1897): n equals a,t,g, or c
  misc feature (1923): n equals a,t,g, or c
ggcacaggcggacgcagctgtgagggagtcgctgtgatccggggccccggaacccgagctggagctgaagcgcaggctgcggggcgcggagtcgggagtgcaggcctgagtgttccttccagcatgtcggagggggagtcccagacagtacttagcagtggctcagacccaaaggtagaatcctcatcttcagctcctggcctgacatcagtgtcacctcctgtgacctccacaacctcagctgcttccccagaggaagaagaagaaagtgaagatgagtctgagattttggaagagtcgccctgtgggcnctnggcagaagaggcgagaagaggtgaatcaacggaatgtaccaggtattgacagtgcatacctggccatggatacagaggaaggtgtagaggttgtgtggaatgaggtacagttctctgaacgcaagaactacaagctgcaggaggaaaaggttcgtgctgtgtttgataatctgattcaattggagcatcttaacattgttaagtttcacaaatattgggctgacattaaagagaacaaggccagggtcatttttatcacagaatacatgtcatctgggagtctgaagcaatttctgaagaagaccaaaaagaaccacaagacgatgaatgaaaaggcatggaagcgttggtgcacacaaatcctctctgccctaagctacctgcactcctgtgacccccccatcatccatgggaacctgacctgtgacaccatcttcatccagcacaacggactcatcaagattggctctgtggctcctgacactatcaacaatcatgtgaagacttgtcgagaagagcagaagaatctacacttctttgcaccagagtatggagaagtcactaatgtgacaacagcagtggacatctactcctttggcatgtgtgcactggagatggcagtgctggagattcagggcaatggagagtcctcatatgtgccacaggaagccatcagcagtgccatccagcttctagaagacccattacagagggagttcattcaaaagtgcctgcagtctgagcctgctcgcagaccaacagccagagaacttctgttccacccagcattgtttgaagtgccctcgctcaaactccttgcggcccactgcattgtgggacaccaacacatgatcccagagaacgctctagaggagatcaccaaaaacatggatactagtgccgtactggctgaaatccctgcaggaccaggaagagaaccagttcagactttgtactctcagtcaccagctctggaattagataaattccttgaagatgtcaggaatgggatctatcctctgacagcctttgggctgcctcggccccagcagccacagcaggaggaggtgacatcacctgtcgtgcccccctctgtcaagactccgacacctgaaccagctgaggtggagactcgcaaggtggtgctgatgcagtgcaacattgagtcggtggaggagggagtcaaacaccacctgacacttctgctgaagttggaggacaaactgaaccggcacctgagctgtgacctgatgccaaatgagaatatccccgagttggcggctgagctggtgcagctgggcttcattagtgaggctgaccagagccggttgacttctctgctagaagagaccttgaacaagttcaattttgccaggaacagtaccctcaactcagccgctgtcaccgtctcctcttagagctcactcgggccaggccctgatctgcgctgtggctgtccctggacgtgctgcagccctcctgtcccttccccccartcagtattaccctgtgaagccccttccctcagcagccgccttctagttnggggtaatcgtgatctgcggctccgcccagcctgtgtngaaaggaggccacgggaataagggancgaattta

SEQ ID NO: 151 - DNA, 1631 bp, Homo sapiens
cggacgcgtgggtttcataatactttcttggcattctagtaagaggaccctgaggtgggagttgtgggggacggggagaaggggacagcttggcaccggtcccgtgggcgttgcagtgtgggggatgggggtatgcagcttggcactggtactgggagggatgagggtgaagaaggggagagggttggttagagatacagtgtgggtggtgggggtggtaggaaatgcaggttgaagggaattctctggggctttggggaatttagtgcgtgggtgagccaagaaaatactaattaataatagtaagttgttagtgttggttaagttgttgcttggaagtgagaagttgcttagaaactttccaaagtgcttagaactttaagtgcaaacagacaaactaacaaacaaaaattgttttgctttgctacaaggtggggaagactgaagaagtgttaactgaaaacaggtgacacagagtcaccagttttccgagaaccaaagggaggggtgtgtgatgccatctcacaggcaggggaaatgtctttaccagcttcctcctggtggccaagacagcctgtttcagagggttgttttgtttggggtgtgggtgttatcaagtgaattagtcacttgaaagatgggcgtcagacttgcatacgcagcagatcagcatccttcgctgccccttagcaacttaggtggttgatttgaaactgtgaaggtgtgattttttcaggagctggaagtcttagaaaagccttgtaaatgcctatattgtgggcttttaacgtatttaagggaccacttaagacgagattagatgggctcttctggatttgttcctcatttgtcacaggtgtcttgtgattgaaaatcatgagcgaagtgaaattgcattgaatttcaagggaatttagtatgtaaatcgtgccttagaaacacatctgttgtcttttctgtgtttggtcgatattaataatggcaaaatttttgcctatctagtatcttcaaattgtagtctttgtaacaaccaaataaccttttgtggtcactgtaaaattaatatttggtagacagaatccatgtacctttgctaaggttagaatgaataatttattgtatttttaatttgaatgtttgtgctttttaaatgagccaagactagaggggaaactatcacctaaaatcagtttggaaaacaagacctaaaaagggaaggggatggggattgtggggagagagtgggcgaggtgcctttactacatgtgtgatctgaaaaccctgcttggttctgagctgcgtctattgaattggtaaagtaataccaatggctttttatcatttccttcttccctttaagtttcacttgaaattttaaaaatcatggttatttttatcgttgggatctttctgtcttctgggttccattttttaaatgtttaaaaatatgttgacatggtagttcagttcttaaccaatgacttggggatgatgcaaacaattactgtcgttgggatttagagtgtattagtcacgcatgtatggggaagtagtctcgggtatgctgttgtgaaattgaaactgtaaaagtagatggttgaaagtacctgcccgggcggccgctcgaaatt

SEQ ID NO: 152 - DNA, 732 bp, Homo sapiens
  misc feature (729): n equals a,t,g, or c
ggaaggggaaaagatttctgcaaatgagaatagcctggcagtccgttccacccctgccgaagatgactcccgtgactcccaggttaagagtgaggttcaacagcctgtccatcccaagccactaagtccagattccagagcctccagtctttctgaragttctcctcccaaagcaatgaagaagtttcaggcacctgcaagagagacctgcgtggaatgtcagaagacagtctatccaatggagcgtctcttggccaaccagcaggtgtttcacatcagctgcttccgttgctcctattgcaacaacaaactcagtctaggaacatatgcatctttacatggaagaatctattgtaagcctcacttcaatcaactctttaaatctaagggcaactatgatgaaggctttgggcacagaccacacaaggatctatgggcaagcaaaaatgaaaacgaagagattttggagagaccagcccagcttgcaaatgcaagggagacccctcacagcccaggggtagaagatgcccctattgctaaggtgggtgtcctkkctgcaagtatggaagccaaggcctcctctcagcaggagaaggaagacaagccagctgaaaccaagaagctgaggatcgcctggccaccccccactgaacttggaagttcaggaagtgccttggaggaagggatcaaaatgtcaaagcccaaatggsctyctgaagacgaatcagnaag

SEQ ID NO: 153 - DNA, 494 bp, Homo sapiens
  misc feature (115): n equals a,t,g, or c
  misc feature (471): n equals a,t,g, or c
atgagaaccaacagcttcgccgaggacctggacctggaaggggagactctgctgacacccatcacccacatctcacagctgcgggaacaccatcgggccaccattaaggtcattngacgcatgcagtactttgtggccaagaagaaattccagcaagcgcggaagccttacgatgtgcgggacgtcattgagcagtactcgcagggccacctcaacctcatggtgcgcatcaaggagctgcagaggaggctggaccagtccattgggaagccctcactgttcatctccgtctcagaaaagagcaaggatcgcggcacaacacgatcggcgcccgctggaaccgagtaggaagacaaggtgacgcagtgggaccagaggytggcactcatcaccgacatgyttcaccagtggtctccttgcacggtgggcagcacccccggcagcggcgggcccccccagagagggcggggnccacattcaacccagcctggggg

SEQ ID NO: 154 - DNA, 2441 bp, Homo sapiens
  misc feature (2): n equals a,t,g, or c
  misc feature (12): n equals a,t,g, or c
  misc feature (2435): n equals a,t,g, or c
  misc feature (2437): n equals a,t,g, or c
anagtctggtgnccccgccgccgcctgcatcgccgccaccgccgctccgccacgaccaccgccgcctcctgccctgcagccaccgccaccgcctgtgtcgccgccgcctcgggaccggctgtatgattaggccacaatcttcaatgagtaaacatattcctcaattctgtggtgttcttggtcacacatttatggagtttctgaagggcagtggagattactgccaggcacagcacgacctctatgcagacaagtgaactgtagaaactgattactgctccaccaagaagcccccataagagtggttatcctggacacagaagtgttgaattgaaatccacagagcattttacaagagttctgacctggatggggtaaacctcagtgcacttcttttctgttggcctcagtattactggattgaagaattgctgcttcttgttaggaggttcatttcacttatcattacttacaacttcatactcaaagcactgagaatttcaagtggagtatattgaagtagacttcagtttctttgcatcatttctgtattcaatttttttaattatttcataaccctattgagtgttttttaactaaattaacatggctcgaatgaaccgcccagctcctgtggaagtcacatacaagaacatgagatttcttattacacacaatccaaccaatgcgaccttaaacaaatttatagaggaacttaagaagtatggagttaccacaatagtaagagtatgtraagcaacttatgacactactcttgtggagaaagaaggtatccatgttcttgattggccttttgatgatggtgcaccaccatccaaccagattgttgatgactggttaagtcttgtgaaaattaagtttcgtgaagaacctggttgttgtattgctgttcattgcgttgcaggccttgggagagctccagtacttgttgccctagcattaattgaaggtggaatgaaatacgaagatgcagtacaattcataagacaaaagcggcgtggagcttttaacagcaagcaacttctgtatttggagaagtatcgtcctaaaatgcggctgcgtttcaaagattccaacggtcatagaaacaactgttgcattcaataaaattggggtgcctaatgctactggaagtggaacttgagatagggcctaatttgttatacatattagccaacatgttggyttagtaagtctaatgaagcttccataggagtattgaaaggcagttttaccaggcctcaagctagacagatttggcaacctctgtatttgggttacagtcaacctatttggatacttggcaaaagattcttgctgtcagcatataaaatgtgcttgtcatttgtatcaattgacctttccccaaatcatgcagtattgagttatgacttgttaaatctattcccatgccagaatcttatcaatacataagaaatttaggaagattaggtgccaaaatacccagcacaatacttgtatatttttagtaccatacagaagtaaaatcccaggaactatgaacactagaccttatgtggtttattccttcaatcatttcaaacattgaaagtagggcctacatggttatttgcctgctcactttatgtttacatctcccacattcataccaatatacgtcaggtttgcttaaccattgatttttttttttttttaccaagtcttacagtgattattttacgtgtttccatgtatctcactttgtgctgtattaaaaaaacctccattttgaaaatctacgttgtacagaagcacatgtctttaatgtcttcagacaaaaaagccttacattaatttaatgtttgcactctgaggtgcaacttaacagggagggcctgagaaaagaatgggagggggctattaattatttttagcaaaatgttgcctttgtcttgtgcaaacatgtagaatatgctctttaatttagtaaaatatttttttaaaaggtagagatgctttgttattgtaatcataaacttcctgaaattcttgtaatttttttcccatacttatcagaagtgtgtttaccaacttatttttgtttgaaagtgtgattttttttttccttcccaacctctcttgcaaaaaaagaaatgggtttctgctaatgaattgagcagacatctaatattttatatgccttttgagctgtgtaacttaatatttggatacttgacaatttgttttattatgtaattgataaaatggtgatgtgtattaatgttagttcaaccatatatttatactgtctggggatgtgtggttatagttctgtgggagaaataattttgtcagtgttcaccagcttgtaaaaacttagtgcgagagctgaaacatctaaataaataatgacatgcatttatcataaaaaaaaaaaaaaaaaaaaaaaaaangncgac

SEQ ID NO: 155 - DNA, 2947 bp, Homo sapiens
  misc feature (1727): n equals a,t,g, or c
  misc feature (2109): n equals a,t,g, or c
agctgaacatctaacactagctatctcttgctagatctccttgctcagcatataactataaatacatgtaaaattacatgtatatggctatatttttatttgcttgctcctagaagagaaaaaaaaatcaactttgaatcacaactaggaattgatgctttaatttttggatactttttcagaatttttaatttactatggtccggcctaagatcctctgttgtatcaggttttgtgcacaaaagaaaagcacaaaagttgaatgcacatggggcatgtgctttctgtgcaccaaatatctggatgaggttcttttttcaggcctacagtcaaatctgtgtccagaattttttgacttttttgctttgtataatcatagaattcattgctgctgatttctataatgattcatgttgtcatgtgtctcttaataactgagggctgtcagtaacctgtgattttgccttttctatagtcttactcccatgaagaaccttggttctgatggagaaagtgaaaagctttatttcttcccctagatatctttatatttctattatattttttagttgtgtactgtgtactagagatttttttcagtttgttatgaacacaatttggtaagccctaaattggttctgcctgtctccaaacagaaacatctgtacaaatcttgttggtatagactactttctggaaaatggtcaagataagttcatgttttcttgaaatttctaagatagtatatggtatcacttgtttaaagcaaatcagactgagtttgacatttaattcaatatttctggtattcagtaacgggtatatatgtttgttcttccagtttgggtcagtttaaaagatatgttgcaaagtatacatagaaaatgtgagcaatgcctctctttgccttttgatcagaaacttcagcagagcggtaaggattccacatgatttaaactgaaatgcttttctttgttgctgtaagaacttaaaatgtaaaatacctttttcagtttaagtcctgtaaacaacattgaagcatggagatgaggcaaggaatagtactcactgaagttgaaatgactgcccacttcaaaatcttcattgtgtttacacaccagtgtatttatacaaatcagaggcattttgtagatgctttgctgacttgttcagctctgtaaaaacacagaaatcagacccattttgtaaagcggaaaatcatgttacatggaacatgtcctgtatatatcacatacatggtaatggagtcttaatgataagtgcaagataataatttaatgatgggattagtctgatcgcttaatatgcacaatcctggaagtgaattacttgcatcagatatagtgatatttattattctgtacagagagaaaaatacatataaaacatatgcttacattacatgcacgcggatttcatgctccataatcttttctattttttaatttacctttctgtaaatgatgtgcatggaatatgccttatagaaaaatgctgttcataatttgactacgtggaaaagtgcctatatggtggtaatgctagtaaggcaaataagacaaattatcatgttggtttactacatcaccagttaacattttatattgtgatgtttaaaaaaraaaaatttatacctcaaatgtgtattttattttacaatcagctgtggggtatggggttgggatgggagaatgggggggttgggnagggcaggtttattcaccatagccgctgataagaatcttcaaaaaaattctatatgcgcactataaatgtttctctgtttgccatttctggtaactatcatgaacacagacagttaactctttcataactgaattggatagctttattttacagaagtatggcaagtttacaaagcaatatctaaatctaattatcattagttgcatttggactaaatgtgatgatatacttttgcaattgattctgtaaataaaaggattacactaaaatatttgtattaaaagaagaaaagataacattttacctttagataactgcacttgtacctcactagagttaatcccacccaatcagattgagaaataaattggggaatgtggnaaagagtccaaaagaggtcagaatttggagaggtactggccttctggacaacatttagaccctctacaattattttcattaagctgattcctacatcctgaatattcatgttttctcatctacagatatttgtcttcccccaaactaaaagaaaaaaaactaccctttactctcttttctactcagttactcttttgtgctatgttagaaacttgaaatatattggtgatgtggggattttgtccctgactgcccactgtacaggacaagagagtacagtgtttcagttggaattcaggactcctggttttgaggtagaggatgatcactgcagtacttggtttggrattgccacaggggtagctaaaccaaaggagggttatatctgcaagggaggtgtaagaaggcaaaataaggaaaaggaggaatgggtttyctatttgtycagtttcatcaactaatttatacacttaatacaacttcagtgtcaattgctattaagaaatttttagttgggctgagctggttctcttgtgaaattgtgctggttatctttaagcttatcagttatttgtccaattaaacacttttcaccagtatttagtccgagttgtacagacgatgtatttggattttgtcatggttcatctacagactcaaaacataatcattttaaagtaccttgggagtgtgtagagtaacttctataatagctttatgatcctgatgatgttttttaaacacaataaagttggatcttccatgttacaatcacagaattaaaaccagtatttaaagtggaaaagtattaaaatattatggacaaawaaaaaaaaaa

SEQ ID NO: 156 - DNA, 666 bp, Homo sapiens
  misc feature (609): n equals a,t,g, or c
  misc feature (614): n equals a,t,g, or c
  misc feature (638): n equals a,t,g, or c
  misc feature (653): n equals a,t,g, or c
  misc feature (657): n equals a,t,g, or c
  misc feature (664): n equals a,t,g, or c
ggcagagcagggccccttttatagccccatcaccacagctggctctgtctcccgccacccacaccagctgtcccactcrccatggagaagatcctgatcctcctgcttgtcgccctctctgtggcctatgcagctcctggcccccgggggatcattatcaacctggagaacggtgagctctgcatgaatagtgcccagtgtaagagcaattgctgccagcattcaagtgcgctgggcctggcccgctgcacatccatggccagcgagaacagcgagtgctctgtcaagacgctctatgggatttactacaagtgtccctgtgagcgtggcctgacctgtgagggagacaagaccatcgtgggctccatcaccaacaccaactttggcatctgccatgacgctggacgctccaagcagtgagactgcccacccactcccacacctagcccagaatgctgtaggccactaggcgcaggggcatctctcccctgctccagcgcatctcccgggctggccacctccttgaccagcatatctgttttctgattgcgctcttcacaattaaaggcctcctgcaaaccttaaaaaaaaaaaaaaaaaagggsgggncccgntctagaagaatcccaagcttacgnaacgccgcgcatgcnaacngtcatanct

SEQ ID NO: 157 - DNA, 627 bp, Homo sapiens
  misc feature (144): n equals a,t,g, or c
  misc feature (550): n equals a,t,g, or c
  misc feature (585): n equals a,t,g, or c
  misc feature (624): n equals a,t,g, or c
gaggcgggcgtgccagtccctggacagctacgacgccatgaatatcttgcccaagaagagctggcacgtccggaacaaggacaatgtcgcccgcgtgcggcgtgacgaggcccaggcccgggaggaggagaaggagcgtgasgnagggtgctgctggctcagcaagaggcccgtacagaattcctacggaagaaagccagacatcagaactcactgcctgagcttgaagcagcagaggcgggagccccaggttctggccctgtggacctgtttcgggagctgctggaggaagggaaaggagtgatcagaggcaataaagagtacgaggaagaaaagcgacaggagaaagagaggcaagagaaagctctgggcatcctgacatacctgggccagagtgcagcggaggcacagactcaacccccttggtaccagctacccccagggcgagggggccccccgcccggcccagccccagatgagaagatcaagagccgtctggaccctctgcgggagatgcagaagcatctggggaagaagagacagcacggcngtgatgaaggcagtcgcagcagaaaggaaaaggangggtctgagaagcagcgacccaaggagcctccatccctngga

SEQ ID NO: 158 - DNA, 902 bp, Homo sapiens
  misc feature (872): n equals a,t,g, or c
cccacgcgtccggcagggctcccaaaatggcgagtgaggctgcggggactcgctgagcagcggagggggagcgtgcagagccgctgcggccctcacagtccggagcccggccgtgccgtgccgtagggaacatgcacttttccattcccgaaaccgagtcccgcagcggggacagcggcggctccgctacgtggcctataacattcacgtgaatggagtcctgcactgtcgggtgcgctacagccagctcctggggctgcacgagcagyttcggaaggagtatggggccaatgtgcttcctgcattccccccaaagaagcttttctctctgactcctgctgaggtagaacagaggagagagcagttagagaagtacatgcaagctgttcggcaagacccattgcttgggagcagcgagactttcaacagtttcctgcgtcgggcacaacaggagacacagcaggtccccacagaggaagtgtccttggaagtgctgctcagcaacgggcagaaagttctggtcaacgtgctaacttcagatcagactgaggatgtcctggaggctgtagctgcaaagctggatcttccagatgacttgattggatactttagtctattcttagttcgagaaaaagaggatggagccttttcttttgtacggaagttgcaagagtttgagctgccttatgtgtctgtcaccagccttcggagtcaagagtataagattgtgctaaggaagagttattgggactctgcctatgatgacgatgtcatggagaaccgggttggcctgaacctgctttatgctcagacggtatcagatattgagcgtgggtggatcttggtcaccaaggaacagcaccggcaactynaaatctctgcaagagaaaagttctcccaat

SEQ ID NO: 159 - DNA, 593 bp, Homo sapiens
  misc feature (590): n equals a,t,g, or c
  misc feature (592): n equals a,t,g, or c
ggcacagagtaagatggcggcgctgagggctttgtgcggcttccggggcgtcgcggcccaggtgctgcggcctggggctggagtccgattgccgattcagcccagcagaggtgttcggcagtggcagccagatgtggaatgggcacagcagtttgggggagctgttatgtacccaagcaaagaaacagcccactggaagcctccaccttggaatgatgtggaccctccaaaggacacaattgtgaagaacattaccctgaactttgggccccaacacccagcagcgcatggtgtcctgcgactagtgatggaattgagtggggagatggtgcggaagtgtgatcctcacatcgggctcctgcaccgaggcactgagaagctcattgaatacaagacctatcttcaggcccttccatactttgaccggctagactatgtgtccatgatgtgtaacgaacaggcctatttctctagctgtggagaagttgctaaacatccggsctcctcctcgggcacatggatycgagtgtgtttggagaaatacacgtttgwtgaacacatcakgctgtgacacacatgccctggacctntng

SEQ ID NO: 160 - DNA, 1847 bp, Homo sapiens
  misc feature (1761): n equals a,t,g, or c
  misc feature (1765): n equals a,t,g, or c
  misc feature (1818): n equals a,t,g, or c
gattatcgaggctcccatggcatggcgttcacgttctttgagtaccgagcgtacaggtcaattatcaaagactacttccaccgtggcgccaagtggacaacagctcctaagcccacaatggctgatgagctttataaccaggattatcccatccactctgtagaagacagacacaaattggctgctcagggaaaatttgtgacaactgagtttgagccatgctttgatgctgctgacttcattcgagctggaagagatatttttgcacagagaagccaggttacaaactacctaggcattgaatggatgcgtaggcatcttgctccagactacagagtgcatatcatctcctttaaagatcccaatcccatgcatattgatgctaccttcaacatcattggacctggtattgtgctttccaaccctgaccgaccatgtcaccagattgatcttttcaagaaagcaggatggactatcattactcctccaacaccaatcatcccagacgatcatccactctggatgtcatccaaatggctttccatgaatgtcttaatgctagatgaaaaacgtgttatggtggatgccaatgaagttccaattcaaaagatgtttgaaaagctgggtatcactaccattaaagttaacattcgtaatgccaattccctgggaggaggcttccattgctggacctgcgatgtccggcgccgaggcaccctacagtcctacttggactgaacaggcctgatggagcttgtggctggcctcagatacacctaagaagcttaggggcaaggttcattctcctgctttaaaaagtgcatgaactgtagtgctttaaacaatcatctccttaacaggggtcgtaagcctggtttgcttctattacttttctttgacataaagaaaataacttctgctaggtattactctctactcctaaagttatttactatttggcttcaagtataaaattttggtgaatgtgtaccaagaaaaaattagtcacctgagtaacttggccactaataattaaccatctacctctgtttttaattttctttccaaaaggcagcttgaaatgttggtcctaatcttaattttttttcctcttctatagacttgagaatgtttttctctaaatgagagaaagacttagaatgtacacagatccaaaatagaatcagattatctctttttttctaaaggagagaaagacttagaacatacacagatcctaagtagaaccaggtaattgtctctttttctaataaggaatttgggtaatttttaattttttgttttttaaaaaataacctagactatgcaaaacatcaragtgaattttccatgaatgtttttaatattctcatctcaacattgtgatatatgctactaaaaaccttttcatatacatcttacctcatttcaagtgaattattttaatcttttcctctctttccaaaaatttacaggaatgtttagtgtaattggatttcgctatcagttcccatccttaagttttgatattcaatatctgatagatacactgcatctttggtcatctaagatttgtttacaaatgtgcaaattatttagagcatagactttataagcattaaaaaaaactaatggaggtaaaacctaaatgcgatgtgaaataattttagtgttgatactgtatgtgtatttttattctaataaacttttgtgttccagattgaaaaaaaaaaaaaagggcggccgctctagaggatcccncganggggcccaagcttaacgcgggcatgcgacgtcaaagctctctccccaaagtgnagtcgtattataagccagggcacgggccg

SEQ ID NO: 161 - DNA, 370 bp, Homo sapiens
  misc feature (363): n equals a,t,g, or c
gcccacgcgtccggtttagatgtaaacagacaagacagagaggagccttctgcagagggagatgaggactctgactatgaccaacgggtggcgctctgagctgctaattgagtcagccgtaaatctgtgaaatgacctgttctttgcaactgtatttatcaagaaagtcaagcgtcctgtaaaatttagagcatcttggaggtgggaggaagtatccctcttaccttgacccctacttttttttatcttctttacatttccagtggaaaccccacttttattttagaataagaaaattaagctgagaacatgagtctgtgctcttggatgaggggcacctagagtctgtgatccaaagccggnattttcc

SEQ ID NO: 162 - DNA, 454 bp, Homo sapiens
  misc feature (183): n equals a,t,g, or c
ggcagaggtgggccactgttctgccgctggctgggtcccttctatactcagtccccacaggktagtccctccttcacgcttgggtcctcactggattccaatgacagtagcttgccctacggcttactgctactgttcaactctggacatcttgttctccttcgctgaatccctttacaacgnccacaactttcagtgccttcattaaaatgccttcatttgcactttcagagtagaatcctgtttccttctgaagcccttcctaattgatatacttagggccatcttccttaacamcccagacctgctggtttcggagccatcgacctsctcatttccaccgcagarggstggrggagattcagaaaatcagggcagggcccaggagaaagttctttcagagcatggcttcagcctggttacttctgacaccagccaggaagaacagacttct

SEQ ID NO: 163 - DNA, 1096 bp, Homo sapiens
  misc feature (144): n equals a,t,g, or c
  misc feature (182): n equals a,t,g, or c
  misc feature (1091): n equals a,t,g, or c
  misc feature (1096): n equals a,t,g, or c
ggagagagagagagagagagagctggttttccatccatcccagtcggcaagagccccatggtggagcaggctgtgcagactggttctgctgacaacctgaatgctaaaaagctgttacctggcaagggcaccacagggacgcanctcaacggtcgtcaggcccagccgagcagcaagacggncagcgatgtagtccagccggcagctgtgcaagctcaagggcaggtgaatgacgagaacagaagacctcagaggaggcgatcaggaaacaggcgaacaaggaatcgctccagagggcaaaaccgtycaactaacgttaaggaaaacacaatcaaatttgagggtgactttgatttcgagagtgcaaatgcccagttcaaccgagaggagcttgacaaagaatttaagaagaaactgaattttaaagatgacaaggctgasaagggggaagagaaggacctggctgtggtgacccagagtgccgaagcgcccgctgaggaagaccttctggggcccaactgctactatgacaaatccaagtcgttcttcgacaacatctcttctgaactcaagaccagctccaggcggacgacgtgggccgaagagaggaagctcaacacagagacctttggggtgtcagggaggtttcttcgtggccgcagttctcggggcggattccgaggaggcaggggcaatgggaccacccgtcgcaaccccacttcccacagggccgggactggcagggtgtgagggtgcagccaaaggctcctactgaagtggcgcataactgacgstgtgtgtktcaggacgcgaggaaaacgctgcacttacagggagaggtggtcactttgtttacggagtttggaagagacccatactgctacttgtgttttggacttaactgaacttggacatggctgaagttagaaccacttgttttggggaagtattcatgggtaacctctttgaggtctctttatctgtgtttcctttttagttgcgcatagcctaattctaaggttttggtattttgcaaaaaggtttctatagtgaaagctgaatccttactttgtgacttttttttttttttnaaggn

SEQ ID NO: 164 - DNA, 2023 bp, Homo sapiens
  misc feature (2005): n equals a,t,g, or c
  misc feature (2016): n equals a,t,g, or c
  misc feature (2019): n equals a,t,g, or c
ggcggggcgcgcgactgctccgggcggcgatggcggcggacggggactggcaggatttctatgagttccaggagccggcccggagcctcctggaccaggagaactgtaacgcgagccccgagcctggggcggaggcgggggccggggcgggtgggggcgccgacggtttcccggcccyggcctgcagcttggaggagaagctgagcctgtgcttccgcccctcggatccgggcgccgagcccccgaggacggccgtgcggcccatcacggagcgcacctcctgcagggggacgagatttggaatgccctgacagataattatgggaatgtgatgcctgtagactggaagtcatcgcatactaggaccttgcacttgcttactctgaacctctcagaaaaaggggtaagtgacagtttgctctttgatacatcagatgatgaagagctgagagaacagctggatatgcactcaatcatcgtctcctgtgttaatgatgaacccctcttcacggcagaccaggttattgaagaaattgaagaaatgatgcaggaatcaccggacccagaagatgatgaaacccctacacagtcagatcggctttcaatgctttcccaggaaattcaaactctcaagaggtctagtaccggcagttatgaagagagagtgaaaaggctctcagtgtctgagttaaatgaaatcctggaagaaattgagactgccattaaggagtactctgaggagctggtgcagcagttggctttacgagatgaactggagtttgaaaaggaagtgaaaaacagctttatttctgttcttattgaagtgcaaaacaaacagaaagagcacaaagaaacagcaaaaaagaaaaagaaactaaaaaatggcagctctcagaatgggaagaatgagagaagtcatatgcccggcacatatttgactacagtcattccttatgagaaaaaaaacggaccaccgtctgttgaagatcttcaaatattaacaaaaattcttygtgccatgaaggaggacagtgaaaaagttccgagcttgttaactgattatattctgaaagttctgtgtcctacatagagcagcaactttatctgcggtgggctccaagctagatttccgacagcattattctgagagctggctaccattacccttcttgctattggaaactcagcacatttgaacttgggtttgattcagtattaacagatcttgactacactaattctttatattatagaaccaacggaaatatgggcactattttgaattctagagatggtttttgttaaatctactaataaactgttctcttagtagattaagagagagtaatattaattgtgcatgtgcagttgtatttctcattaactgacagtatgcccatttgtttttatggctttcttatctaaactgcactgatgaactagattaaagccttgggagatttatactataaattcagtgatggcaagaaccaacactgtttttttgtgagaattgtcagtgtaactattacctaccagtattgttcagagagattgaaacagaataaacgggctgttcttgaagaagcaaaaccagaatatgcattactttggtttaatacttagtgctaacattgaaactgttggtggtgatggattttgtagcttgctgcttgtttcaccactggtcaaattttaaccattaaattgccattcacttttagaatcttgtatttaagttttgattttcaaatgttctgcttcatgtgtctgtgaagaattgtactttaagtgtgtgtcctctgaggtgcttgagaaagtgtacactgcagaactgcccattctcattactgtgtcctattttattcatgcctgtgtgtttttcttaagtatgaattctagatacagctacttatggattcatcaatatcatgagcacttttgctggttccagtcaaatcaatggcatttaataaattttttaagaagtaaaaaaaaaaaaaanggggggccgcnctngagg

SEQ ID NO: 165 - DNA, 1320 bp, Homo sapiens
  misc feature (1158): n equals a,t,g, or c
ctctcattggctctgctgcasccctgaccaacgctccaataggccgggatccagccatacttcaatggatcccaggggtatcttgaaggcatttcccaagcggcagaaaattcatgctgatgcatcatcaaaagtacttgcaaagattcctaggagggaagagggagaagaagcagaaggaggcctgcagtatccctgggattgggaakcggatggctgasaaaatcatagagatcctggagagcgggcatttgcggaagctggaccatatcagtgagagcgtgcctgtmttggagctcttctccaacatctggggagctgggaccaagactgcccagatgtggtaccaacagggcttccgaagtctggaagacatccgcagccaggcctccctgacaacccagcaggccatcggctgaagcattacagtgacttcctggaacgtatgcccagggaggaggctacagagattgagcagacagtccagaaagcagcccaggcctttaactccgggctgctgtgtgtggcatgtggttcataccgacggggaaaggcgacctgtggtgatgtcgacgtgctcatcactcacccagatggcyggtcccaccgggktatcttcagccgcctccttgacagtcttcggcaggaagggttcctcacagatgacttggtgagccaagaggagaatggtcagcaacagaagtacttgggggtgtgccggctcccagggccagggcggcggcaccggcgcctggacatcatcgtggtgccctatagcgagtttgcctgtgccctgctctacttcaccggctctgcacacttcaaccgctccatgcgagccctggccaaaaccaagggcatgagtctgtcagaacatgccctcagcactgctgtggtccggaacacccatggctgcaaggtggggcctggccgagtgctgcccactcccactgagaaggatgtcttcaggctcttaggcctcccctaccgagaacctgctgagcgggactggtgacccatggctgggggtgctgaggagagccgagttggactggctacccctcctggccacccagtactccytccagcctcagctggctgaacctcgccgctccaaccaccagcttcctcagcgagcagggcccagggctctgggcntgaaagcaagagccagcccggctcccagtgtctgcccggctcccagtgtctgcccagccctctcccagacaggaacaaggctgscaccccttctamctyamcactgcccctccgaaaraatttttgcaaatkggccccttgccccatttttaaagcaagggg

SEQ ID NO: 166 - DNA, 1205 bp, Homo sapiens
  misc feature (1027): n equals a,t,g, or c
  misc feature (1200): n equals a,t,g, or c
gggcactgcaccttaccccacccatccatgccagcacttctgcactacggccattctcctcttgggcgctcctcagcctcactgtgacctttctgccagagctcccagccaggcctactctgctgaggtggcgcttcctgctaagggcccttctctgccctttctgccctccttcccatcccacatgctgagccgccacaaagaccaaagaagtgatggcttttctctgtcccctgctgctctgaggggagaggggtgggtctcctgagccactcagatgggaaagtcccttactcggcccctccctccccagcagccccaagctttacactggatgcagcgatcaacccaccactcaccaggcctctcctcccctctgcccccggctcttagctccagctgctccaggtagttggttcatccttccccctctctccctccctgcttccccttcagtgcttacttggctccagccctccagctgcagcccctggggaaaagcagcctcccttctcctctccctccactccctcgctccctccctcagcccctgtctctgccaggtgcctcctctcagtcaggcttcagagcagccctggagacaggagggccatgttaaaagctttttcacagttttaagaagacaagtggagggtgaggatagtggtggggggtctggcaccatctcattgctttaatcccagcaacacaggtggcagcttctcccccttccttcccaccccagtccctcttcccacccctctcttctagcttggtaatgaagtatatttattggtgaaggaaacagctgctgctgcttctcctgctgctgggacctgctcccctgtctcttctccgtgacctttctctagccagggagaagggagagcaggagtattggggctggccctggggccaaggaccagctgggtcccctttgctttcttgtgttccagccacctgccatttcctccctgcctcccaccctccctccctgccccctgtcctgcttcccaccccctgcctncccagcctgggccctgcagtgtggagagacacataagccttactgtcctctgggggcaggagccgagcctttttgttgyccgctcccaggagagtgagggtgacgcaattgattaaaaccattttgttctaaaaaaaaaaaaaaaaaaaaaaaggggggcgctctaaaagatnctcga

SEQ ID NO: 167 - DNA, 1413 bp, Homo sapiens
  misc feature (1376): n equals a,t,g, or c
gggatggcgtgtgggtctccattcgcttggattctacgctccgtctctatcatgcacacacttatcaacatctacaggatgtggacattgagccttatgtaagcaaaatgttaggtactggaaaactgggcttctcttttgtgagaattacagctcttatggtgtcttgtaatcgtttgtgggtggggacaggaaatggtgtcattatctccatcccattgacagaaaccgtaatcctccaccagggacgtttactggggctgagggcaaataaaacctcaggtgtaccaggaaatcgtcctggaagtgtaatccgtgtatatggtgatgaaaacagtgataaagtgactccagggacatttataccctattgttcaatggcacatgcacagctttgcttccatgggcaccgggatgctgtgaaattctttgtggcagtcccaggtcaagtcatcagcccacaaagtagcagtagtggcacggatctgacgggtgacaaagcagggccatctgcacaggagcctggtagtcagacgcccttgaagtctatgcttgtcatcagtggaggagagggctacatcgacttccgaatgggtgatgaaggtggagaatcagaacttcttggagaggatcttccacttgaaccttctgtcaccaaagcagaaaggagtcacttgatagtgtggcaagtgatgtatggcaatgagtgagcccatgggaaacaggtggagatggggaagccgtctcttctgcatggtttattttccctctatccttttatttaatgctcttttgtgagataagtttcaccacataatgtgtgagcattttttcctgttaactttatattacaaaatccgttctaccataacaatacagaggaactagctgtgttactgcaccagtgttataggtaacttcagtatattatgaacaaatcaaagaatgtttacttcctgcaaactggtgaattatagaaagcaatccagatgtggtttactctgccacagtctaatgtcattcacttcatttgatggggtcacttgttagctgtcactaataatggaattaatgggaaacacttgataaatgaaactgtaccgttaaatacaatagctgagttttccccagtgtattgtaaaattgacacacactaatacaagatggattatcaggatgtatctaaatgtcccgagagggttaaaagctaactgtaaattactttaactttcactttcaaatctgacaaatcttgtttatatggtatataaaactttgttttcatcagatttgggggggttttatattaaagaaattaagactacactatttaaataaacgtttcctgtttctgacttaaaaaaaaaaaaaaaaanctccgggggggggcccgggacccattgggccccttgg

SEQ ID NO: 168 - DNA, 1228 bp, Homo sapiens
  misc feature (1178): n equals a,t,g, or c
aattcggcacgagctttccaagttgtagtgttgttgttttcagcctgctgctgctgctgctgttgcggctaggggaaccgtcgtggggaaggatggtgtgcgaaaaatgtgaaaagaaacttggtactgttatcactccagatacatggaaagatggtgctaggaataccacagaaagtggtggaagaaagctgaatgaaaataaagctttgacttcaaaaaaagcaagatttgatccatatggaaagaataagttctccacttgtagaatttgtaaaagttctgtgcaccaaccaggttctcattactgccagggctgtgcctacaaaaaaggcatctgtgcgatgtgtggaaaaaaggttttggataccaaaaactacaagcaaacatctgtctagatgtattgatggaatttctggctttctaaatgattttactttctgccttgaattttcaaggcatagatgtcaacttacagaataacatgttttaagataattaagtttaaaccagagaatttgattgttactcattttgctctcatgttctaaacagcaacagtgtaactagtcttttgktgtaaatggttattttccttataagaattttaagaactaagtggcaaattccatgaaaatatttcycrgttctgkatgcacttttatttaacattattcatataattctccccccaccactttatttatagatactgcaaaagtgagaaggagataatagatactttgctctgaatttggcatccagagttaacatttctcccctcactcccttgctggtgtcatagttattagaatcagcagcctcttaactaattgcggtttcataggatatataaatgtttcaagccattattgctgaatggttctttagttattaacctagacccaaatcaaagaccagttggatttatgatattttttatttgttcttgcagccaaagtgccagtttctttaatatgtgaccaagaacacaaggagcatccatatggccaaataaatacactgaattttagaaaaacatattactttgaattcaaattgtcatgaaaaccagaacagtgtttgtccatgttgcatgtaatgaaaataaatccctgctctgagaaaagctctttgaagcaaaaaccaaactttttttttttttttttacctcctgncttgccccctaaaagaaatmmatagagcaaacatcttgactctccctttt

SEQ ID NO: 169 - DNA, 1925 bp, Homo sapiens
acccacgcgtccgcccacgctccgatatgtgactgctgatggtaacatttcttgtatgcagcaggaaaacctgcaggctatacgcaaggtatgtgaataaagactgtggattgaagggggaaaagttgataatacatacccatgataagaattcatattttctctttctttgtctcttcatacagaagcaagttcgagcagagaaggttagcagttacagcacttaaaagtttaggattgagggtttttggttggtttttttgtttttttgttttttccatatttcactgttgctgaacattgatttagtcttccaaaatggacatcactagtaagtgcactgaatactgaaataygctgattggcaagcatatatctgtagctagaatttttttaaccgtaattccagaatttaaaaaggtaagagatctgctttttgatagaggccttttaaaaagactatataacatttctatttggctgtttatgtgaatgcycagggaatttggacatgtgttttatacagaagtggctttttatatttcttcaagtgataaattagcattaggacatatcagatagaacaggccagtttcctgatgagattggtagagatgttacggtaggktcatccttcctttttccatgttatatgtggagaagtgttaaacttgctcaagcaaatgggagtaggagataggctgaaaatagagattgctacaccattctattttgtyttcatgcctgttttttctccaatcctatatggacatttgagaaatggaccacaaatctgagagggatagagtaaaaagaggcattaatgtatgtactcacaagttagacctattttgctgttaaaataggtctggtcttgtcataggtcataggaattgtgtagttgagttgctgcgagaaagagtcaagaacttagacttgaatgggaaggccaactggtgagggaagtggggtattatctactcaaatgttctaagctaatacaaaasaattacctggcaagcatccccctctgcccttcttgagattctgaatgaacttagaatcagatcaatggtgagacccagttatgtaactttcctttgaagttctaaaggataattgaaaataaagtagtmtggcatgttttaacagtaaggagtgacactaaaatttgaatataacagtatgttgcaactatttataatagacctatttatgttttgagaactaagtaaaatgctatgaaaaattcmcmtwaagcacttaagcaccaaatgaaaatcatttcgtgctttcaaattaatgatactaggcttgtaggatgtcttagaatcatgtttaacaagaagttaaaatatttgcattttgaaatttttatgcagtttggctaaggaggaacttggaaaataacattcatcagcttctacactgcactttttgtatgtggactttgtaaagtttaatgtccgtttaacagttgcttgtttatttgtgtaaacctagctagtaaatattgatgatgttcagggccactgacttgcacagcccttggagcactattcacacagaacacaattcagagtttgttaagacattaacacactttgatatctattccaaaaatacttttgttaccacaggttcattgctgtcatttagacaaaattaatgtactgtgatattttccyactcttaagatgatgttgcccagcctagtactgtcagaaattcagttctgatgtctgtgtgtgcaagatattaatgtggtccctgtaagaaataccagagttggtcatgatttactaaggagatgtaatattttctttgacctgttaggaatataacttgtgtcttgatttgttgcacatcatattttttgcaacattaatgaatttaaataaattaattggaaccctgtgccgaat

SEQ ID NO: 170 - DNA, 1558 bp, Homo sapiens
  misc feature (1535): n equals a,t,g, or c
  misc feature (1536): n equals a,t,g, or c
  misc feature (1537): n equals a,t,g, or c
  misc feature (1551): n equals a,t,g, or c
gcgggcgtcaactgtcggtctcgcacgtctctcctgagaactaccgagtaggtcgggcctgcctgtgagcaaacgaggcccctgagagctccacctagttcacaggataaaatcccacagcagaactcggagtcagcaatggctaagccccaggtggttgtagctcctgtattaatgtctaagctgtctgtgaatgcccctgaattttacccttcaggttattcttccagttacacagaatcctatgaggatggttgtgaggattatcctactctatcagaatatgttcaggattttttgaatcatcttacagagcagcctggcagttttgaaactgaaattgaacagtttgcagagaccctgaatggttgtgttacaacagatgatgctttgcaagaacttgtggaactcatctatcaacaggccacatctatcccaaatttctcttatatgggagctcgcctgtgtaattacctgtcccatcatctgacaattagcccacagagtggcaacttccgccaattgctacttcaaagatgtcggactgaatatgaagttaaagatcaagctgcaaaaggggatgaagttactcgaaaacgatttcatgcatttgtactctttctgggagaactttatcttaacctggagatcaagggaacaaatggacaggttacaagagcagatattcttcaggttggtcttcgagaattgctgaatgccctgttttctaatcctatggatgacaatttaatttgtgcagtaaaattgttaaagttgacaggatcagttttggaagatgcttggaaggaaaaaggaaagatggatatggaagaaattattcagagaattgaaaacgttgtcctagatgcaaactgcagtagagatgtaaaacagatgctcttgaagcttgtagaactccggtcaagtaactggggcagagtccatgcaacttcaacatatagagaagcaacaccagaaaatgatcctaactactttatgaatgaaccaacattttatacatctgatggtgttcctttcactgcagctgatccagattaccaagagaaataccaagaattacttgaaagagaggacttttttccagattatgaagaaaatggaacagatttatccggggctggtgatccatacttggatgatattgatgatgagatggacccagagatagaagaagcttatgaaaagttttgtttggaatcagagcgtaagcgaaaacagtaaagttaaatttcagcatatcagttttataaagcagtttaggtatggtgatttagcagaacacaagagagcaagaaaatgtgtcacatctataccaaattraggatgttgagttatgttactaatgtatgcaactttaattttgtttaacactatctgccaaaataaactttattccctataacttaaaatgtgtatatatatataatagtttattatgtacagttaattctactgttttggctgcaataaaatcgattttgaaataaatgaaatgttgaaaattttaaaaaaannnaaaaaaaactggcnggggggc

SEQ ID NO: 171 - DNA, 1402 bp, Homo sapiens
  misc feature (1370): n equals a,t,g, or c
  misc feature (1400): n equals a,t,g, or c
gctgatcctgggggagctggagaaggggcagagtcagttccaggccctctgctttgtcacccagctgcagcacaatgagatcatccccagtgrggccatggccaagctccggcagaaaaatccccgggcagtgcggcaggcggaggaggttcggggtctggagcatctgcacatggatgtcgctgtcaacttcagccagggggccctgctgagcccccatctccacaacgtgtgtgccgaggccgtggatgccatctacacccgccaggaggatgtccggttctggctggagcaaggtgtggacagttctgtgttcgaggctctgcccaaggcctcagagcaggcggagctgcctcgctgcaggcaggtgggggaccgcgggaagccctgcgtctgccactatggcctgagcctggcctggtacccctgcatgctcaagtactgccacagccgcgaccggcccacgccctacaagtgtggcatccgcagctgccagaagagctacagcttcgacttctacgtgccccagaggcagctgtgtctctgggatgaggatccctacccaggctagggtgggagcaacctggcgggtggctgctctgggcccactgctcttcaccagccactagagggggtggcaacccccacctgaggccttatttccctccctccccactcccctggccctagagcctgggcccctctggccccatctcacatgactgtgaagggggtgtggcatggcagggggtctcatgaaggcacccccattcccaccctgtgccttccttgcgggcagagagggagagaagggctccccagatctacacccctccctcctgcatctcccctggagtgttcacttgcaagctgccaaaacatgatggcctctggttgttctgttgaactccttgaacgtttagaccctaaaaggagtctatacctggacacccacctccccagacacaactcccttccccatgcacacatctggaaggagctggcccctcagtcccttcctactccccaacaaggggctcactatccccaaagaaggagctgttggggacccacgacgcagcccctgtactggattacagcatattctcatctctggccccgaggctgcctgtggggcgagtggagacctcccatcactgagacagatcacagaccacgagtgcctttcccggacctggacgttgcctccagagcaggcaccagctctttccctctctagacagaaatatttttgtaaggttctggggcagggagggagcatgaagtacgaggaaaacttgaattccagatttttaatgcaaagtatttatcatttctaccagaaataaacgttttaagtttttacttgnaaaaaaaaaaaaaaaaaaaaaaaggggggncg

SEQ ID NO: 172 - DNA, 490 bp, Homo sapiens
  misc feature (469): n equals a,t,g, or c
  misc feature (489): n equals a,t,g, or c
gcttccctctggcaatggctcccttcagcacttctgctttccactccaattcacacaggagaattgctcgaactcagggggtggaggttgcagtgagttgagattgtgccattgcactccagcctgggcaacagagcaagactctgtctcaggaaaaaaaaaaaaaaaaaaagaaaagcaacatagtggggtttctcaatctgtcctcggctgcccttctcatttgttgatgggaccttgaaagcaagcttgctaggtgccctctgtggctccagcctttaccggaagtgtggtgcatgtttttaacttcagggaagcggtatcctgtcactggggtatgggaatgagcatggagaararagcacccagccacgaattcccttccctaagcatctcctgttcctgactgctccatgaattgaaaaaaactgacccttgttttttaaaaaaaaaaaaaaaaaaaaagggnggccccctaaagaattccanc

SEQ ID NO: 173 - DNA, 1437 bp, Homo sapiens
  misc feature (198): n equals a,t,g, or c
aggttgattgagctgctctctgaagaggaagaggagaaagccagagagtcactyttacctccctgtctgcttactcacccactctgtcctttcctcaccaactaacatgtgccagccaggcagagtcttgtgctgttcccagaacaggacgacatkaaaagaacactcttggaccctacactgaaggctgaaggcagnaagccacaagaggccttgagtgccacccccagggaagaacataaagggttgcacaatgccacccatccactccttgccaagtgttacccagatggtggaggatgtgaagggattgcaccaagccacattcactctctctgtggcctttcttcctctgggcaaaraarggcttycagtggcctttcctcactctgtagtgtttgtggggataggttccatgcaagaacaccttcctcctccatcccccacttcaccccatcccataccagttccatccagggtctgcttaactgccaagagcaggtcctggagttcccttcacctgcagagtccttttcatgacctaggaggtcttattcaaagccctcattgacagaggaggaaacaggccaaggcaggacatggctggaccatggtgatacagctctgtgtgattcaagttctggcagagcttgtaaggctagagcccaggtctgccgacaccctgtgcttgttgcacacttgatttgctaaggctggagacaggcaccattgccatggggctggtcctagtcactggccgaggataagcccgtccctgtcccacattctagccccactatgcgggggtgctgttgtcctgcctgtgtctcatccccggctgcctaagctagggacactcaagtgcttccttccttgccccatcttcctcccaactggaggcctctgagcctcccctgtgccttgggccctgaagccccatatgtagtatagagcaaaggtggctcctggtgaagagagggtggaaaggcccttcagccccagggccatgtctgggttctccatgcccatcagtctctgcagtttctctacctgcccccagagctgaggccatctgcaagcccctgcccatggcccaatggggagcctccagccacaagttccctgtccttatcagccactgggtggttcccactgcatgaccctctatccctgccatctgtccccatggtttccagctcaatccacccctgacccatctgtcagctttttcccagggagccgtttcaggggttctgggcagtaggctgggcctggcctcagaacctggtggctcctgcctgctccttcacttttgtaaaaccatccccttcaccagaatggtattaactcctggtgctttgtactactggtccagctgccytgggctccttttctatattaataaagaaacgagtaaaaattaaaaaaaaaaaaaaa

SEQ ID NO: 174 - DNA, 1815 bp, Homo sapiens
tcgacccacgcgtccgccaagaagtcgcccaagcccaggagtcctaggctgaggctgcaccaagacctcgtgtgtcaccccacagagctgtctgtgggtgccttctcaatctcagggcaaaagccctggagaatattycagccagcagagaattttgacttgcagtaggatttggtttgattttcctacgatctgggtggatgccttgcctgtgacagttgcagttcctattcgccaaatgaagggcagtgccccgcacgtaagttggaatgatggacctgtgttcagagacttaacagaaccaacaagcaaaacaagtgagaacaggaaaaaggaagaggacactggaatcaattcttgagagttgcactacttggtttttcttccattccaagtttcgtgggacccagagccttttttcttttaaaagctaaaaaacaagtgtttaattcctctttttgttatctgttagataattgagatcacctagaaatgcgtttaatctgttcactcactgtaaattttgaggacccagaattgtcttgtttaatttatactttcacccctgttgcagttaacaccagagaaggaacgtgaatgtcgagcacagccactacccttgttggcacttaatttagaaatagggtgagaagtttaaaagcccatcttgattttattttcattccttttggttctctgtgtaataatagcaggctacatagtgacattccagttccaagaaggtacatcctgtccattcattaattgctttgattactaggagggtttctgttcagttttgtttttaaatgtcttgctgatctagttctttcagatggaataaccttccagtcccttagagagtggaactagtccatataacccagcttcagtagcaaaagtagaagccgccacatcttttcatttctccaagaggagagtggggaaggttcccatgaccagctgggcagtcaggatttctctaggcattctaatgtgaaataagtgtagactgctgtcaaggaggcttcatcagaagatgtatagcatttgaatgtctaatgataatgcatatcattagaatccaagctttgaaaatttctgattaatgctcatgtatttctttatctttgtttttccttgtgaagaaagactttcaccactgtctgagtgatgatgctgttgataaggatgatgtcgatgactactatattgcatctctcaggaacagctgatgggaagggaggggctgctgagttcccttgttctagctagcagcacgctcctcagagagggggccgagttacagacagcagccgcattctcatgcaaaattagttttaaactgctagtgtgggcatcggtaccttttgcctgggtgataccgaagaattgttgaggatttagtatgctccgtagagacagttcagccagtcatttctgcattggagagacttctcatactttctttgaagactcatagaaagctggatctagagcttttgaatccttaattagcacagtagaaattagctttctatgggaatgctttagtgttagcagttgacaattaggcccatattcaatctgaatgggaacaaaagtaaatgcaatgataatatactgctagttagagaaacatgttagttgattatacctgaaatggattatttatctcatcagcaagtattatttgaataaaatgagaaatgcttaagaaaaattgttgcccatagtaattgggttcgagatggatggtacyatttttcccaycgwsctttgagagaagaatgtgatgactggatgacctgaaag

SEQ ID NO: 175 - DNA, 971 bp, Homo sapiens
  misc feature (6): n equals a,t,g, or c
  misc feature (27): n equals a,t,g, or c
  misc feature (961): n equals a,t,g, or c
  misc feature (965): n equals a,t,g, or c
ccatgnccggcccataagtaccgtttntgaggttcagtcttaaacatttgctttaagaaamcagtccttgaatttcacatgctgctatttttatattttgccattttacagtactgttttgttttgaattcatgcatatcattgaaaatttctcgttttcattttcttagatgacttcttgtctgagacagaaaaatttcctactacagcagtgcagtccagaggttaagatgtattagaattatacaatatcagtttaaaaatctgtatgcataaagaatgcaccactcaacttttttattcataagctaatatttttttaaagttacattaagattttttctcttttgcagctacatttgaaagtgatagaataaagagattttaatgagttatcactttttcagctgatatattcattttaatggcttttttgaaagttcctttttcatgaacacacccgagaaatcttaaatagacactttgcaatatttaagaacctaatgctgtttaattttggtacagcttccacattgcatgttcactttagtatttgcaatttgatatatttcatggtggcaaaatattagctctgttttgggacattttaaaatagaactatccttgttcgatagcataggaaaatgttctggtgattgtcagggtctcctaatatttatctcaattcttttataagtctatggaaattatttaattattttaaaacgtacacacttttcttgtaaatatgtcacatctgagttcaaaaaaattactttgaataccttaatatttgctgcatttttttccgtatatataacatgtcttctttcagaatgggaatatatgtgtgcctcccaacatttactgttaaagtgtgttatctttatatgtcaaactggttgaacactgtaatgagaataaactgcacagagtttattctgaaaaaaaaaaaaaaaancccngggggg

SEQ ID NO: 176 - DNA, 1622 bp, Homo sapiens
  misc feature (1394): n equals a,t,g, or c
  misc feature (1444): n equals a,t,g, or c
  misc feature (1606): n equals a,t,g, or c
  misc feature (1613): n equals a,t,g, or c
  misc feature (1618): n equals a,t,g, or c
  misc feature (1622): n equals a,t,g, or c
ggcacgagggrcggggttgccggaagaagtggcgaagttacttttgagggtatttgagtagcggcggtgtgtcaggggctaaagaggaggacgaagaaaagcagagcaagggaacccagggcaacaggagtagttcactccgcgagaggccgtccacgagacccccgcgcgcaccatgagccccgccccccgctgttgcttggagaggggcgggacctggagagaggctgctccgtgaccccaccatgtcctctcctaccacgagttccctggatacccccctgcctggaaatggcccccctcagcctggcgccccttcttcttcacccactgtaaaggaggagggtccggagccgtggcccgggggtccggaccctgatgtcccaggcactgatgaggccagctcagcctgcagcacagactgggtcatcccagatcccgaagaggaaccagagcgcaagcgaarraagggcccagccccgaagatgctgggccacgagctttgccgtgtctgtggggacaaggcctccggcttccactacaacgtgctcagctgcgaaggctgcaagggcttcttccggcgcagtgtggtccgtggtggggccaggcgctatgcctgccggggtggcggaacctgccagatggacgctttcatgcggcgcaagtgccagcagtgccggctgcgcaagtgcaaggaggcagggatgagggagcagtgcgtcctttctgaagaacagatccggaagaagaagattcggaaacaacagcagcaggagtcacagtcacagtcgcagtcacctgtggggccgcaggcagcagcagctcagcctctgggcctggggcttcccctggtggatctgaggcaggcagccagggctccggggaaggcgagggtgtccagctaacagcggctcaagaactaatgatccagcagttggtggcggcccaactgcagtgcaacaaacgctccttctccgaccagcccaaagtcacgccctggcccctgggcgcagacccccagtcccgagatgcccgccagcaacgctttgcccacttcacggagctggccatcatctcagtccaggagatcgtggacttcgctaagcaagtgcctggtttcctgcagctgggccgggaggaccagatcgccctcctgaaggcatccactatcgagatcatgctgctagagacagccaggcgctacaaccacgagacagagtgtatcaccttcttgaaggacttcacctacagcaaggacgacttccaccgtgcaggcctgcaggtggagttcatcaaccccatcttcgagttctcgcgggccatgcggcggctgggcctggacgacgctgagtacgccctgctcatcgccatcaacatcttctcggccgaccggnccaacgtgcaggagccgggccgcgtggaggcgttgcagcagccctacgtnggaggcgctgytgtcctacacgcgcatcaagaggccgcaggaccagytgcgttcccgcgcatgcttcatgaagctggtgagcctgcgsacgytgagcttttgtgcayttcggagcaggtytttygscttkkgggtttcagggayaaggaaacttgccgcctnttgttgncgganaatn

SEQ ID NO: 177 - DNA, 340 bp, Homo sapiens
tgtcagtgcggcggggcgcgcgasgcgccagctcggggcagcggaacccagagaagctgagggggcggtagcggcggcgacggcgacgacgacgactcccgcgcgtgtgcccagcctcttcccgccgcagccgcccttttcctccctcccttacgtccccgagtgcggcagtaccgcctccttcccagccgcgcggcttcctccagacctctcggcgcgggtgggcaccatgtccttgaagtttcagggcaagcaatgtwaaccaacaagaatggaccccaagtccatcaatctcgatcttattggaaaccttcaacacagtttgggtggaagaattcag

SEQ ID NO: 178 - DNA, 616 bp, Homo sapiens
  misc feature (604): n equals a,t,g, or c
  misc feature (610): n equals a,t,g, or c
  misc feature (613): n equals a,t,g, or c
  misc feature (615): n equals a,t,g, or c
atttacttttcatagcaatcccatgaggcagatactctttattattcctaatttacagattaggaaactgaggcagagagagaataagtaacttgcctgaagtcacatggtggtagagactgggcttgaactcacctctgacattagtctgcactcttaaccacaacttatattgcctgcttaaatggtatcatgaagctggtatctgttctgcatggatggttttgagttctcattcatttctgaccaggttctgagtaaatacacagtttgccatctacatatcttagccccttctttcaaaaatgggcttttaatcagagatgtagaaagagtctcwcatatttyaacycttagagataaatctatgtgcataacaaacatactgtgtagaggcggtgtgttaagataacttttaagggtattcattggctgttccacccagccaatgctcagtagggtctgggagcttcatgactgtctggcttcatgccttgttcatcaatgaaccacaaatccaggaggaaagtatggacccatcctgtagcattgccttggtacctgggctacaacacaagacagctgggggaaagaagctgctgcngtgaangcncnc

SEQ ID NO: 179 - DNA, 2067 bp, Homo sapiens
tacgaggtcttgagggataacacgttggtcacgttggccaacatttccgggcagctagacttgtctgcttacacggaaagcatctgcttgccaattttggatggcttgctgcactggatggtgtgcccgtctgcagaggcacaagatccctttccaactgtgggacccaactcggtcctgtcgcctcagagacttgtgctggagaccctctgtaaactcagtatccaggacaataatgtggacctgatcttggccactcctccatttagtcgtcaggagaaattctatgctacattagttaggtacgttggggatcgcaaaaacccagtctgtcgagaaatgtccatggcgcttttatcgaaccttgcccaaggggacgcactagcagcaagggccatagctgtgcagaaaggaagcattggaaacttgataagcttcctagaggatggggtcacgatggcccagtaccagcagagccagcacaacctcatgcacatgcagcccccgcccctggaaccacctagcgtagacatgatgtgsagggcggccaaggctttgctagccatggccagagtggacgaaaaccgctcggaattccttttgcacgagggccggttgctggatatctcgatatcagctgtcctgaactctctggttgcatctgtcatctgtgatgtactgtttcagattgggcagttatgacataagtgagaaggcaagcatgtgtgagtgaagattagagggtcacatataactggctgttttctgttcttgtttatccagcgtaggaagaaggaaaagaaaatctttgctcctctgccccattcactatttaccaattgggaattaaagaaataattaatttgaacagttatgaaattaatatttgctgtctgtgtgtataagtacatcctttggggttttttttttctcttttttttaaccaaagttgctgtctagtgcattcaaaggtcactttttgttcttcacagatctttttaatgttctttcccatgttgtattgcatttttgggggaagcaaattgactttaaagaaaaaagttgtggcaaaagatgctaagatgcgaaaatttcaccacactgagtcaaaaaggtgaaaaattatccatttcctatgcgttttactcctcagagaatgaaaaaaactgcatcccatcacccaaagttctgtgcaatagaaatttctacagatacaggtataggggctcaaggaggtatgtcggtcagtagtcaaaactatgaaatgatactggtttctccacaggaatatggttccattaggctgggagcaaaaacaatgttttttaagattgagaatacatacctgacaacgatccggaaactgctcctcaccactcccgtcatgcctgctgtcggcgtttgaccttccacgtgacagttcttcacaattcctttcatcattttttaaatattttttttactgcctatgggctgtgatgtatatagaagttgtacattaaacataccctcatttttttcttttctttttttttttttttttagtacaaagttttagtttctttttcatgatgtggtaactacgaagtgatggtagatttaaataattttttatttttattttatatattttttcattagggccatatctccaaaaaaagaaagraaaaatacaaaaaacaaaaacaaaaaaaaaagagggtaatgtacaagtttctgtatgtataaagtcatgctcgatttcaggagagcagctgatcacaatttgcttcatgaatcaaggtgtggaaatggttatatatggattgatttagaaaatggttaccagtacagwcaaaaaagagaaaatgaaaaaaatacaactaaaaggaagaaacacaacttcaaagatttttcagtgatgagaatccacatttgtatttcaagataatgtagtttaaaaaaaaaaaaaaraaaaaaacttgatgtaaattcctccttttcctctggcttaatgaatatcatttattcagtataaaatctttatatgttccacatgttaagaataaatgtacattaaatcttgtt

SEQ ID NO: 180 - DNA, 1827 bp, Homo sapiens
  misc feature (1524): n equals a,t,g, or c
ttcgcggctgtcggtgccggttgcgtcatcttcctgctcatcatcatcttcctgacggtcctactactgaagctacgcaagcggcaccgcaagcacacacagcagcgggcggctgccctctcgctcagtaccctggccagtcccaaggggggcagtggcacagcgggcaccgagcccagcgacatcatcattcccttacggactacagagaacaactactgcccccactatgagaaggtgagtggggactacgggcaccctgtctacatcgtccaagagatgccgccccagagcccggcgaacatctactacaaggtctgagtgcccggcacggcctcaggcccccgagggacagtcggcctggaccggacctctcctttcgcccccacaccccctccccttgccagctgtgccacctttgtatttagttttgtagtttcttggcttttataatccccctttttccctgccccctgggcttcggaggggggtgcttgtgcccctaacccccatgctcttgtgccttccccctctggccaggcctctgggctccgtgggggcgccccttcttggaaggcagggctggacactgatggacagcaggcagggagacagtcccctggccctgcccctccctcgccccccttgccaccttcccaggactgcttgtccgctatcatcactgtttttaatgcttttgtgttcattttttagctgtcaactcattttcatctgttttttgaagaaaaatggaaaaatgtaaaaggcagcccctccccaggctttgtgagcctggcccaagccagtacaagagggcctggggcacgatgtggtcagccaggaagcataggatgccatttcttttatagattccttggtatttctggtggggtaaggggcaggccagggctgttcacgcccatgagggaagaggaaagtgccactgggcaaggtgtcccaccctcccctcctgaccctcctacgaggcttatcctggcaatggggtagtcactgccacccttccacacacacacacacacacacacacacaaaaaaaaatcccttccttgtgggattcttgggcatctcctgcctccctcactctcacggtaattaatgtcttaattggctgttgcctggggaacaggagagctgctgcaggcagatgacctcatggggggtggagggaggtgaggtgcccaggtggctatttgccctgcagagctgggagtttcacccccaccccccaccctgttctctccttacctttggcatcctttggcctggtggggaaacagaggcccagggtggagacctaagcgggtataagaccaggtggcctgctccttttctgggccctagcacaggtgggtaacccccacccaacccagctcctgctgctgtcccagtcttgggctggggcctggaaagaggaagaggctgcctggggctgggccagcccgctgtgcactttgaccccagttccttgccagcacggctgctaacagactgccacttgagtgngccttgcaggcactcccagagcagccatggaaggagctggccctcacaccatccacctccacactgcctcctggccagctgcccaccccagtgccaggtgggagagggagcagaacagccagccccttccaggtggcagtcggaagggtttttgtttttgtttctgttgccatttgtgtaaatactagtctttttggaaaaaaaataatgtaaagatgttttgtataaactctgaattattttcttgttgcttttttcttagaaaaaaatgagaactaaaaaaaaaaaattaaccacatggaa

SEQ ID NO: 181 - DNA, 2026 bp, Homo sapiens
aaggcagtttattcatatataggctgcaataagacatacgtcttcggtattactgatttgtattaaagaagcagtttatcacagagaattttctgcaaatttatcaacatgatataagtaacacttctaactgtttaaacctgtcaaggctttgagtagtaaaacgattttttctatttctaattcatgtatgtattttcacagggtgatagagttgtgttatttagccaatttaccatgatgctggatatcttagaggttctattaaaacatcatcagcataggtacctcagattagatggaaagactcagatttctgaaaggattcatctaattgatgagtttaataccgatatggatatctttgtgtttctgctatcaacaaaagctggtggattaggaataaatctgacttcagcaaatgttgttatacttcacgatattgactgtaatccttataatgacaaacaagcagaagatagatgccatagagtaggccagactaaagaagtactagttataaaactaataagccaagggacgattgaagaatccatgctaaaaattaaccaacagaaattgaaactagaacaggatatgactacagtagatgaaggtgatgaagggagtatgccagcagatatagccacattactaaaaacatcaatgggcctgtgaaataagaactgtgaactctcaattgatgaggaaatatcaacttggtgcactcaaggacatttacattatgatgaccatggggtttatgaacatttataactttttataatttccatattacatttctcatagtatggacaactttttgccactaactgaattctccaaatactcacacgtgaaatttcaaaaaagaagccacaaatatgtagttctgaagatgttgaataatcattttacaaagcagttttctgaatggggattagttggtgattgtttgtaacaaatatgctaatgctttagaaatgtcagtatttttgtaattatttctacctccaaatatatatatattgtctttcactggataatgtgtgtagatttttacatgtgccttatttgacaatgcttatgtcttgtttttgcttgtctcatttgaagttcttttttattatgttaaagaatgcagctgtatagattatatagctttcattttattgctatttgaagcagatgttcaccaatgtcagcaagaactcaacctgaatttaaaggtggcattccatatactaacatcccccaggtcctctcaagtacttctgctgaaacaaatttatttggctaggcactaagttgttttccagtgaatagtaactaaagaagcccctaccttgctccatggattaattccttctgttcattttccaactgcactaattgtgcatattactctgcctaatcttgtgcatgttttcattgatttccctctcccggcttttgcttctcttgaaactgttgcccagtcacttctgctccaattctcttcctctctaaatagtagtttattactgccacatctccatgcatcagcaaaatgttggtgacatttttctagcctggcagaacagattacttaaagctatttcayttcaaagcagactgaatgtgacttcatctaaaggcagcattaggtactgcatggaaataggtcattaacttgaaactcttatcaaaatatattttaccagtttccagaatttccagtacaggaccgcctgaagagagagccattgttcaattccaattcagtgtgagtgacaaagtgaaatttagaagtgaagttgtctatttgatatttaactctttattaaatctttctttaaatttctgcctgtcagtctatattgctgtttttattatacatcagtttctttgtataacttgtgagttccatgtgttttgtttttattatgtaaatatcattataaataaacttatttataaatcaaaaaaaaaaaaaaaaaactcgaggggggcccggtacccaattcgccggatagtgatcgtaaac

SEQ ID NO: 182 - DNA, 456 bp, Homo sapiens
  misc feature (419): n equals a,t,g, or c
  misc feature (450): n equals a,t,g, or c
  misc feature (453): n equals a,t,g, or c
  misc feature (455): n equals a,t,g, or c
tggtactaaacatatccattcacccttagtttatgtgccaaccttattttatattacattcccaaattatatatagctctgtttctaagctctattctgctctattggactattgtctgttcttatgctaatcctaccttattttaatgtctgtgactttagtcataggacataccttgaagaataggaactcccttactgtttaaacagttcatttggctatatgtggaattttattctttctatataaactttaaggtttgtttatagagttccttaaaaatttgatyggaattgtataaattaatagggagaaagttgatatctttatgatatttgttccatccaagagcatggaatgtctgtattttaaattatcatctatattggttattaggtcttacatattcatgattagntcctaggttctttataggattagggttttgntgntng

SEQ ID NO: 183 - DNA, 481 bp, Homo sapiens
  misc feature (3): n equals a,t,g, or c
  misc feature (4): n equals a,t,g, or c
  misc feature (463): n equals a,t,g, or c
ttnntttctcccagacagtgtccgccgtgtgcctgcccagcgccgacgacgacttccccgcggggacactgtgtgccaccacaggytggggcaagaccaagtacaacgccaacaagacccctgacaagytgcagcaggcagccctgcccctcctgtccaatgccgaatgcaagaagtcctggggcaggaggatcaccgacgtgatgatctgtgccggggccagtggcgtctcctcctgcatgggcgactctggcggccccctggtctgccaaaaggatggagcctggaccctggtgggcattgtgtcctggggcagcgacacctgctccacctccagccctggcgtgtacgcccgtgtcaccaagctcataccttgggtgcagaagatcctggctgccaactgagcccgcggctccctccgaccctgctccccacagagcctcagtaaacccatggaacacanaaaaaaaaaaaaaaaaaa

SEQ ID NO: 184 - DNA, 496 bp, Homo sapiens
  misc feature (60): n equals a,t,g, or c
tggggataccaccaggtgaggaccactctggaaactggtggatcccccgggactgacagnaattcggacagaagaccctctggctcctctcctgcttctcccttgtgggggccgcctttggctgcggggtccccgccatccaccctgtgctcagcggcctgtccaggatcgtraatggggaggacgccgtccccggctcctggccctggcaggtgtccctgcaggacaaaaccggcttccacttctgcgggggctccctcatcagcgaggactgggtggtcaccgctgcccactgcggggtcaggacctccgacgtggtcgtggctggggagtttraccagggctctgacgaggagaacatccaggtcctgaagatcgccaaggtcttcaagaaccccaagttcagcattctgaccgtgaacaatgacatcamcctgctgaagstggccacamctgccccsttytyccagacagtgtccgccgwgtgcctgcccag

SEQ ID NO: 185 - DNA, 1307 bp, Homo sapiens
  misc feature (4): n equals a,t,g, or c
  misc feature (7): n equals a,t,g, or c
  misc feature (383): n equals a,t,g, or c
  misc feature (1271): n equals a,t,g, or c
  misc feature (1275): n equals a,t,g, or c
  misc feature (1279): n equals a,t,g, or c
  misc feature (1294): n equals a,t,g, or c
gtcngantcccgggtcgacccacgcgtccgccggaagaagaggaactgggcctgaaaggtaccggtgaccgctactgctgccggtgtttgcgtgtggcagggagccaggcctggcgagcggggtgtgtcgcgatgccggagctggcagtgcagaaggtggtggtccaccccctggtgctgctcagtgtggtggatcatttcaaccgaatcggcaaggttggaaaccagaagcgtgttgttggtgtgcttttggggtcatggcaaaagaaagtacttgatgtatcgaacagttttgcattcctttgatgaagatgacaaagacgattctgtatggtttttagaccatgattatttggaaaacatgtatggaatgtttaagaaantcaatgccagggaaagaatagttggctggtaccacacaggccctaaactacacaagaatgacattgccatcaacgaactcatgaaaagatactgtcctaattccgtattggtcatcattgatgtgaagccgaaggacctagggctgcctacagaagcgtacatttcagtggaagaagtccatgatgatggaactccaacctcgaaaacatttgaacacgtgaccagtgaaattggagcagaggaagctgaggaagttggagttgaacacttgttacgagatatcaaagacacgacggtgggcactctgtcccagcggatcacaaaccaggtccatggtttgaagggactgaactccaagcttctggatatcaggagctacctggaaaaagtcgccacaggcaagctgcccatcaaccaccagatcatctaccagctgcaggacgtcttcaacctgctgccagatgtcagcctgcaggagttcgtcaaggccttttacctgaagaccaatgaccagatggtggtagtgtacttggcctcgctgatccgttccgtggtcgccctgcacaacctcatcaacaacaagattgccaaccgggatgcagagaagaaagaagggcaggagaaagaagagagcaaaaaggataggaaagaggacaaggagaaagataaagataaggaaaagagtgatgtaaagaaagaggagaaaaaggagaaaaagtaaaacatgtattaaatagcttttttaatttgtaaattaaaatcttacaaactaaatcagtgtgctgctagagggttctttttcacttgacatgcttattagaaagctgacccamcaagagctctctgcctccggtcactcttgctgtggtgctacgtggaagtgaatngrgnctgntctcaaatctgactncagtttcgtctgt

SEQ ID NO: 186 - DNA, 449 bp, Homo sapiens
  misc feature (402): n equals a,t,g, or c
  misc feature (437): n equals a,t,g, or c
  misc feature (440): n equals a,t,g, or c
gcggacgcgtgggcttctgtactgccaggtccgggtcggcggctgcactgcggatgagaccggtgcgactcatgaaggtgttcgtcacccgcagatacccgccgaggctgtgaggtggagcagtgggactcggatgagcccatccctgccaaggagctagagcgaggtgtggcgggggcccacggcctgctctgcctcctctccgaccacgtggacaagaggatcctggatgctgcaggggccaatctcaaagtcatcagcaccatgtctgtgggcatcgaccacttggctttggatgaaatcaagaagcgtgggatccgagttggctacamcccagatgtcctgacagatamcamcgccgaactcgcagtctccctgctamttamcamctgccgccggttnccggaggcatccgaggaagtgaagaatggtggctnganctcgtggaa

SEQ ID NO: 187 - DNA, 951 bp, Homo sapiens
actatagggaaagctggtacgcctgcaggtaccggtccggaattcccgggtcgacccacgcgtccgcagcaatccggttgttctcggttagactgggtcggggccaggggagaagcagtcacccctgtgtagagggttcccgctgtgcttctgagcagttgctttgttcagaagtgttaggagggtcagattgtgccataattgttattaaagagaaaacacgcccaccttcctttctcccctgctggccattgttcattgagttttactgagggcagcctttgtggaagtcagggaggttgccaaaggcctgtagatgcctcctgacaaggtcttgattcctggttttctagcacccatttgcattttggtcttcagcacaaagccttgttccctgtggccggacttctgggcaataagactggggagtgactgttgagcagtctgctgtcaggagagatggctgaaaaggtgatcatcttggtgctaaacaagtaagaggcaactgccctgtttttgtttgttttgaggcacaatgaaactttagccaaactctgcaagagggtcccatctcctgccatggccaggtgtgagagaccaaaccgagaaaacagcatactctatcacttaagccttgggtagaatgggaattctttaccctgggtaaacgttttaacaaaaaaatggaacttaacttcggtttggactgtggtcgtgctgaggcaggagtggggttgccctcttggggctgaatctccaggcctcacgaggtccctgtggggatgctgctatttctaagatgcaaattgcacatttcctagattttgtatctgtggatttggataagggaggggaacacggacaaattgcttgtacaatttgaaatgggcctcaatggtacttcaaaccttttgattattcctaaataaaaacataaatataaaaaaaaaa

SEQ ID NO: 188 - DNA, 381 bp, Homo sapiens
  misc feature (293): n equals a,t,g, or c
  misc feature (350): n equals a,t,g, or c
ggcacgagcagctccgcgccgcgcggaacccaccgagcccgcgctcagacgccccagctccgctgacaggccgctcgcgccgggtccttcctcttcyccargtgcaggcagagcccccrgagmcrtggccagcccttccsgcagctcygaagccactggcaagccccgaggcagggatggcsggcccaggagggaggaggasgacgtcyctcccgaagaraagaggctgcggctcttgctggagrggggaagcgcacagcccsaggactgcgaggacggggaggacgcgccgnggccgggcagggwggwgaccggcacccagacaggtggcgacggcagaggagtaagtnacgcgggcgcgggggtccgggggtgccgggt

SEQ ID NO: 189 - DNA, 1309 bp, Homo sapiens
gggcgggctgcagtgttaatgggaggggtaactggggactcgagctcagtgatgacgcgactctcacgtgaccaggagtcgacgtgtgcagaagtccttatagtccagggcctgtttccctgtagcagctccttattgctggagaaggagaaaagtgcccaagatcctttcaggatatttggttttttgggcgcgacacaaatcgaggtgagggaagagagaggaaaatcccctgaatccctgcaggattaatttattcaaaaaggaaataaaaaatactcaatatgcaaaagtcttgtgaagaaaatgagggaaaaccacagaacatgccaaaggccgaggaagatcgccctttggaggatgtaccacaggaggcagaaggaaatcctcaaccttccgaagaaggcgtaagcagggaagcagaaggaaaccccagaggagggccgaatcagcctggccagggatttaaagaggacacacccgttaggcatttggaccctgaagaaatgataagaggagtagatgagcttgaaaggcttagggaagagataagaagagtaagaaacaagtttgtgatgatgcattggaagcaaagacattcacgcagccgtccttatcctgtgtgctttaggccttgaattcatttttgcctaatattaaaatctggccccagctttctttctgttagcattttctgatgtatctttgacctccattttacttttaatcatctgatgaaatttkgttttaggtaatttccttggtaccagcatctcattggattttggattttgacccattttccaggtctatttttcaattggaaactttcacacatttgcatgggaatatgttcattccatgttgtaaagtaaaacataacaggttatggcaaagcagcatatttaatatcagctcacatatgtaggataaaattccaaactttgtgtgtgtgcgtgtgtgtatacatacatccatataacatatatcacaaacttaaccaagcttatttctgtgtggtgtgaaattttatttgttttcttctttttgttctttttgcttatatgtactttttaatgaacacgtgtctcacacacaaaaagaattaaggattttttttacaagtaagagtcaaataatttgcaaccagcttatgagggcaatgggggcacctaaactcttgatgaaagaactttaaaaagaaatgtaaacctcaaattacctctggatctcttagccagaggaataaactggcaattattacagataaaaaaaaaaaaaaaaaactcgtgccgaattcggcacgagc

SEQ ID NO: 190 - DNA, 1899 bp, Homo sapiens
  misc feature (776): n equals a,t,g, or c
  misc feature (1026): n equals a,t,g, or c
  misc feature (1887): n equals a,t,g, or c
  misc feature (1895): n equals a,t,g, or c
gcgaggcgaccgctgaggccgcggagagtgacggcggcccggccgacggagccggggcggggcggcggctcagcgaaggagcgcgcgggcggtctggccccgccccctccccgcccgccttcccggtgaccttcagggcccgggtggcgggcgcaggcccctgcggcggcggcgggatgttcgtgcaggaggagaagatcttcgcgggcaaggtgctgcggctgcacatctgcgcgtccgacggcgccgagtggctggaggaggccaccgaggacacctcggtggagaagctcaaggagcgctgcctcaagcactgtgctcatgggagcttagaagatcccaaaagtataacccatcataaattaatccacgctgcctcagagagggtgctgagtgatgccaggaccatcctggaagagaacatccaggaccaagatgtcctattattgataaaaaagcgtgctccatcaccacttcccaagatggctgatgtctcagcagaagaaaagaaaaaacaagaccagaaagctccagataaagaggccatactgcgggccaccgcmaacctgccctcctacaacatggaccgggccgcggtccagaccaacatgagagacttccagacagaactccggaagatactggtgtctctcatcgaggtggcgcagaagctgttagcgctgaacccagatgcggtggaattgtttaagaaggcgaatgcaatgctggacgaggacgaggatgagcgtgtggacgaggctgccctgcggcagctncacggagatgggctttccggagaacagagccaccaaggcccttcagctgaaccacatgtcggtgcctcaggccatggagtggctaattgaacacgcagaagacccgaccatagacacgcctcttcctggccaagctcccccagaggccgagggggccacagcagctgcctccgaggctgccgcgggagccagcgccaccgatgaggaggccagagatgagctgacggaaatcttcaagaagatccggagnaaaagggagtttcgggctgatgctcgggccgtcatttccctgatggagatggggttcgacgagaaagaggtgatagatgccctcagagtgaacaacaaccagcagaatgccgcgtgcgagtggctgctgggggaccggaagccctctccggaggagctggacaagggcatcgaccccgacagtcctctctttcaggccatcctggataacccggtggtgcagctgggcctgaccaacccgaaaacattgctagcatttgaagacatgctggagaacccactgaacagcacccagtggatgaatgatccagaaacggggcctgtcatgctgcagatctctagaatcttccagacactaaatcgcacgtaggtggcgttgttccactcggctatcaggccacagcagccccctggtgcggcccgagaccgggcagagtggacctcacctggaaactcaccttcagcgcctcagccctggactgttagaggtgctgcagckgctcctgctctctgatcttattgcttataaactttggtgacggtagtgtgtaaggccgtatttttagcatctgacaggtgtttacaaaaaagtggttgtcgcactgggaagtggagtgatggcctcgtctccagtgctcctctgggctcttgagttgctgcttgaattgccgtgtagacatttgcttggagagtccacttgttatttgacggaggtaggtttcaacccagagttaatgtcaagcatgctaatttaactagtcactcacagatgacttttctttaataaagtcccttttcctaaaaaaaaaaaaaaaaaaaaaaaaaaaaaaaaaaaaaaaaaaaaaaaaaaaaaaaaaaaaangggggggncccc

SEQ ID NO: 191 - DNA, 2490 bp, Homo sapiens
  misc feature (2484): n equals a,t,g, or c
tcgacccacgcgtccgtccargtgaagggrgaaaaaaaaagcctatactttggcaggttatgaactttgaatgtgatgaaatgacacgtttggctgcatttggatggtgtcttagaaccctcattgctcagacctgaaggctacttctaggagcatgaagtttgagttttgtgtttttccaaaggatacttccttggccctttttctttattgactagaccaccagaggaggatgtgtgggattgtaggcaaacccacctgtggcatcactgaaaataaatttgatcatacctaagaggttaggaaatggtgccattcccaccttagagtgctacataggtgctttgggcgtatgtaacattagtgtccttccttgaagccacaagctagttttcttagttttaaaatcctgttgtatgaatggcatttgtatattaaaacacttttttaaaggacagttgaaaagggcaagaggaaaccagggcagttctagaggagtgctggtgactggatagcagttttaagtggcgttcacctagtcaacacgaccgcgtgtgttgcccctgccctgggctccccgccatgacatcttcaccttgcagcttgtgctgagactgacccaagtgcagctagcactgggacacagatccttgtcttcagcaccttccaaggagccaacttttattccctttcctctctcccctccccacctcgcttcttcccaatttagtaacttagatgcttccagcacatacgtaggtagctaccccagccggtttggattacaggcctgtgctggaacatcatctcagttgkccaccttcctggcaggctgtagacctgacattttgagacaagcctagagtcaggagcagggactttgactcttaggaagagcacacatgagggcaaggctgctggcagacgtctccattgtccttatgttgtctgtgttgtatttttttttttttattgaccatggtgattatttttttaaaccatcgttaatatactgaagtgagctatagcacatatcatgtsyttagtttgtttatttttctccatctccccttggcttcctagagtttggacatattccaggctaaatgcttttactcaagactacagaaaggtttgaagtagtgtgtgcatggcatgcacgtatgtaagtaatctggggaagaagcaaagatctgtttcattcttagcctcaggcctcatgagggtctccacagggccggagctcaggttacaccactccttcgtccttacaggagatgtagggagaagaatctgcaggctgcttgtrggactgttcaccaagggggataccagcagcaagagagtgcacccgtttagccctggaccctgtttcttactgtgtgacttggctagagttgggagttcccccaaaataaacgtgtccccattttaccagaaccaaacctcaacacagcgaagsttactgtctttgtgtggcaaagatgttcccttgtaggcccctttcaggtaaccgtcttcacaatgtattttcatcacagtttaaggagcatcagccgcttctcaagtgggtagggaaagcagaaaaacgtacgcaagaggacatggatccaaaatgatgatgaagcatctcccatggggaggtgatggtggggagatgatgggctaaacaggcaacttttcaaaaacacagctatcatagaaaagaaacttgcctcatgtaaactggattgagaaattctcagtgattctgcaatggatttttttttaatgcagaagtaatgtatactctagtattctggtgtttttatatttatgtaataatttcttaaaaccattcagacagataactatttaattttttttaagaaagttggaaaggtctctcctcccaaggacagtggctggaagagttggggcacagccagttctgaatgttggtggagggtgtagtggctttttggctcagcatccagaaacaccaaaccaggctggctaaacaagtggccgcgtgtaaaaacagacagctctgagtcaaatctgggcccttccacaagggtcctctgaaccaagccccactcccttgctaggggtgaaagcattacagagagatggagccatctatccaagaagccttcactcaccttcactgctgctgttgcaactcggctgttctggactctgatgtgtgtggagggatggggaatagaacattgactgtgttgattaccttcactattcggccagcctgaccttttaataactttgtaaaaagcatgtatgtatttatagtgttttagatttttctaacttttatatcttaaaagcagagcacctgtttaagcattgtacccctattgttaaagatttgtgtcctctcattccctctcttcctcttgtaagtgcccttctaataaacttttcatggaaaakctcctgtgccaggaaaaaaaaaaaaaaaaaatctcgggggggggcccggtncccatt

SEQ ID NO: 192 - DNA, 1808 bp, Homo sapiens
  misc feature (1228): n equals a,t,g, or c
ggcacgagaatgaactggtttgcatttcttttaaagagatgatagaggaaaatatagttttttgtaagaatgtttatctctcttaaaagataatcttttaattttcttcagataacaagttattattattttttaagaaagcaagtttcaccgtgcccggccaaagtcagctttcaaaatccaagccataattggtgaggggggagtttcagaattacatagaaaaattaatatttgaaaaaataattctgaaatttcgaatttaaaaacagatgtgctgcttctgggtgtaggtagtaaaagtataggaaaagaactgtttccttagaagcggactgtggaagggctatgtagaatgtcaaagggcaacaagagcctgtgtttttaatgtcatcctgtactcggcacaaatcaaaggccaatacaagtctgaaaagcagaaataaatatttttccaggtttttgcttgggcacatactaactgctttgggcattctaatctggtctccaaacaccaaagacccatttcgagcctgctattagcctgctgctgactctatcacttggagcaataatgtggggttatggtggtggaatcttgtatatttttgtcaaaaataaaaccttgagttaaggggatagatatagatggaaaaatacacaaataaatacggtatgaaaacacatggaaatgtgtctttgtcaaatatgaatcattattaccatcacaaaaattcttctcttggccaatatctcatttccctatatagtatacaagcaccatttcttctcaatttttaagaagagaaattagtccattaccacaggggttcttgtcactactaattatacaacaatcttttcccaacaaaaagatgtcctccacaacctttgttttcaaagcagacagcatctatgtggccaaatatactttgggttgttcttgaggatactggttttgggctgatgactatggtgggcagcatggatccattgggctccttctgctaaacagccacattgaaatggtttaaaagcaagtcagatcaggtgatttgtaaaattgtatttatctgtacatgtatgggcttttaattcccaccaagaaagagagaaattatctttttagttaaaaccaaatttcacttttcaaaatatcttccaacttatttattggttgtcactcaattgcctatatatatatatatatgtgtgtgtgtgtgtgtgngcgcgtgacgtgtgtgtatgcgtgcgcatgtgtgtgtatgtgtattatcagacataggtttctaacttttagatagaagaggagcaacatctatgccaaatactgtgcattctacaatggtgctaatctcagacctaaatgatactccatttaatttaaaaaagagttttaaataattatctatgtgcctgtatttcccttttgagtgctgcacaacatgttaacatattagtgtaaaagcagatgaaacaaccacgtgttctaaagtctagggattgtgctataatccctatttagttcaaaattaaccagaattcttccatgtgaaatggaccaaactcatattattgttatgtaaatacagagttttaatgcagtatgacatcccacaggggaaaagaatgtctgtagtgggtgactgttatcaaatattttatagaatacaatgaacggtgaacagactggtaacttgtttgagttcccatgacagatttgagacttgtcaatagcaaatcatttttgtatttaaatttttgtactgatttgaaaaacatcattaaatatctttaaaagtagaaca

SEQ ID NO: 193 - DNA, 1073 bp, Homo sapiens
  misc feature (1028): n equals a,t,g, or c
  misc feature (1069): n equals a,t,g, or c
gcttacctaaaagagctagggtacatctgaatttttagacttgactgcttttctgaatggcattttgtaaacttcatttaaatttcaaaaatctttttgagctttttcaaatgataggtttttaaaaatatttttctatgtgatgttctgttcttcaaaaaacaaatacattaaaaactattattgtgggaccatattggcctggaaaaaaaaatctttcttaattgagcataaacaggaataaagattaattcaaaatagtttttcctccttcttttggaatgtggcatccccatcacagttaakgatgtaagtttttcaaaactgagtcagggactagtttatcccacaatgcgacaatgtgggcagggtaattgtaggttgggctcagttttcttgccagagttctaatgctgtttgtgtacttacctctaagtggaataatttaggtacctataaagtaagggctcaataacaataaccttaatgatggctaatatttattgaacatttactgtatgataggaatttggcaaagttttttcatgatcttcacatcaactttatgaggtagataatatccacattttatagctgaggaaactgaaatgtaatggttaaataacttaactaggctcacacggacagtaaataagctgtatgtccaagattacaatctagacagtttaactgtggagcctgcaccattaattgctatacagtatcataatcatcaccaccaccaccatccctactgtctctcagatcgatttttaggatattggttagatgaaacagagtacatgtgatatatagccaaagctctcttctctataatattagctctcacagccattggggtcttcaaccattcagagctgataagcaaagatatcagcgtactggaacacagaacagtgccttgcatacatacctaggacaatatctggcacaaggtaggcactcaaatattcattgaaggagtggcaagatggtaactattcacatcaacccccgacaggacaccnttttgcaatggctataacgcgtcctggcccaagcctaaaanccat

SEQ ID NO: 194 - DNA, 387 bp, Homo sapiens
  misc feature (67): n equals a,t,g, or c
actattttgaaagatggccgcctgcaggtaccggtccggaattcccgggtcgacccacgcgtccgtncccccaggccgtccgcgcaggcgccgtgcgtaaactggacgcagacgaggacggcctcccctacctgtgcactggctacgacctgtacgtgacccgcgagccctgcgccatgtgcgccatggccctggtgcacgcacgcatcctgcgcgtcttctacggtgcgccctcgcccgacggcgccctgggcacccgcttccgcatccacgcacggsccgacctcaaccaccgcttccaggtgttccgcggggtgctggaggagcartgccgctggctggamcccgacacgtaggcgccgsccttctgscttcggacccttcccg

SEQ ID NO: 195 - DNA, 973 bp, Homo sapiens
  misc feature (88): n equals a,t,g, or c
  misc feature (89): n equals a,t,g, or c
  misc feature (101): n equals a,t,g, or c
  misc feature (189): n equals a,t,g, or c
  misc feature (895): n equals a,t,g, or c
  misc feature (960): n equals a,t,g, or c
  misc feature (969): n equals a,t,g, or c
tggtcgacccacgcgtccggacccacgcgtccgtgaagatggtggtgcttattgactacaagaggaaattctacaggattaggatttnnaagactactatnggaattggttggcagtgccagctggctcttttttttaatattttattatttttgttaactttattatatgaaggtactggaataaaangaacagacatccctttctaactgcactgcctacatgcgtattaaggtccattctgcctgtgtgtgctgtggctttgaactgtaacacctctaatcaattcaggagaaacacatatcatttaaagcaacataggctaacctgtaggtaacactgcagtattgatgttttactgcaaatcttatgggtctagataatcagtaaaagccatcttccatagttggtgttagaacattgccctattggtttggacatctgtagaatatatatgaagacaatttctgtaatggttttaagagatttaaaaagaaattcactggttctttacaaaatagaatttatcatcaagttattacacaaacttcacagtaaggagtgacaagtttataataaggaagacaaagtttaacaccttcactcaagcactccactaatatatttacgttgcattcagaaatactgatgaccttcatatacgtagtctgtatactcatagggagatgtactgtattatataacatgtaaagttgattttcttgtgacaagagaacttctttttttaacaagaggacatggcattattttaatttgattatggtgagttgaatttaagacatgaccatgaaggctgcttgtagaattagtgatttttattaaactattttttaatgkcaacttcttctgttwatggattatagagaaccaaaanctattactttgggtttctagaaaggtggtacatatcatggcttggttaactttattccttttgangaaaatttncttg

SEQ ID NO: 196 - DNA, 643 bp, Homo sapiens
  misc feature (588): n equals a,t,g, or c
  misc feature (605): n equals a,t,g, or c
gccaacatggtgaaaccccgtctctactaaaaatacaaaaattagccggtgtggtggcatgcacctgtagtcccagctactcgggaggctgagagaggagaattgcttgaacccagtaagcagaggttgcagtgagccgagatcatgccactgcactgtaacctaggtgacagagcgagactccatctcaaaagaaaaaaaaaaaatcagaagagttgggctccagtctcagctgtatcattttctaactgatttttacaataaaaatgagagtaaaaatcagttactctttctagacattaattagcacatttacgttaagactctaagtagtataaaatgtaaattgctgctaccctactaagttactgtcagtaaatactgtgtgcagtaaatgttgagtatggattaattgaaggatacctctacaattatttcctttagtcaaggttgtagctaagaattgggcttctgacatacattctttttaatctttttcgtattgggktttatagcactaaacctaatttctaacatatttttacacctgaaatctacattctaatataaaggtttttttttataacnttcctaaaatttcaggncctcagcaggcagtttttgtcccagttttcttcaacag

SEQ ID NO: 197 - DNA, 452 bp, Homo sapiens
  misc feature (91): n equals a,t,g, or c
ggcacgagggcgaacagccccgacgcgaggacggggaaaccaaggcggcagcagggagaccctgaccgaggttccctgggaaccagtggtncgaagggctgagctgtgtggccagacaagaggtccctgccctcccccagtgaagccctgctgttcccgtgggagccatgaagctgaacgagaggagtgtagcccactatgcactcagcgactccccagcggaccacatgggcttcctgcgcacctgggggggcccagggaccccaccgacccccagtggcactggccgaagatgytggtttgtcctcaagggcaamctgctattctyctttgagagtcgcgagggccgggccccaytgagcctggtggtgytggaaggctgcacagtggaactggccgaggctcccgtgcccgaggagtttgcctttgccatctgctttgatgccccctgg

SEQ ID NO: 198 - DNA, 1032 bp, Homo sapiens
  misc feature (41): n equals a,t,g, or c
ctccttgacaaccctggcgggggttcgctggctgcggcccnggctccggcccccgcaggagcagcaccccccggggaaagacattttctgctcccaccgagttggcagggcctgcttcctgaatctcctgggtgtgtcttaactgccagtcccagcacctcctgaaagccccactctcctccagtggtcacagtggaaggatcatgggagaaacagaagggaagaaagatgaggctgaytataagcgactgcagaccttccctctggtcaggcactcggacatgccagaggagatgcgcgtggagaccatggagctatgtgtcacagcctgtgagaaattctccaacaacaacgagagcgccgccaagatgatcaaagagacaatggacaagaagttcggctcctcctggcacgtggtgatcggcgagggctttgggtttgagatcacccacgaggtgaagaacctcctctacctgtacttcgggggcaccctggctgtgtgcgtctggaagtgctcctgacactctgtcccctgccccgtcccctgcagggccttttcctgccactcatctggggtggggagcagccctaggcaggtcctggtttttccaaggagagttggggtcttttctttttgtctttgtgtaccagtttcctgagccacgcccagtgtgtgaacttgacatctccatccccaggctctcaactgtctccctcggagtctcagggtgtggacggggcagcgggcatgggtctgtgtgggagacgtggggtggggcggtgtgacagggtagaggaggtgggagatgagatcttccgcacaggaacacgccagtccccctttctccagggctgccttccccttgcatcctgggagccccactgccctgccatccccagtactgccgggaagtgtcggccgtccttgtcattagtggtcatatgaaaatggccccaagaaggagatgattctttcaagggwcacaggcctctggtggggacactggggcaggagtgctcttcaccacgagg

SEQ ID NO: 199 - DNA, 2732 bp, Homo sapiens
  misc feature (2190): n equals a,t,g, or c
  misc feature (2680): n equals a,t,g, or c
  misc feature (2694): n equals a,t,g, or c
  misc feature (2701): n equals a,t,g, or c
  misc feature (2726): n equals a,t,g, or c
tgaatgggaccgtggtttgctctagcacccatctctacgcgctttcttgtcccacagggagccgccgtgatgagcacagccaacccagttcccggagsctggggcggtgcakgctctgggacccaggggccagggtggctcttctctccccacccctccttggctctccagcacttcctgggcagccacggccccctccccccacattgccacatacctggaggctgacgttgccaaaccagccagggaaccaacctgggaagtggccagaactkcctggggtccaagaactcttgtgcctccgtccatcaccatgtgggttttgaagaccctcgactgcctccccgatgctccgaagcctgatcttccagggtggggaggagaaaatcccacctcccctgacctccaccacctccaccaccaccaccaccaccaccaccaccactaccaccaccacccaactggggctagagtggggaagatttcccctttagatcaaactgccccttccatggaaaagctggaaaaaaactctggaacccatatccaggcttggtgaggttgctgccaacagtcctggcctcccccatccctaggctaaagagccatgagtcctggaggaggagaggacccctcccaaaggactggagacaaaaccctctgcttccttgggtccctccaagactccctggggcccaactgtgttgctccacccggacccatctctcccttctagacctgagcttgcccctccagctagcactaagcaacatctcgctgtggacgcctgtaaattactgagaaatgtgaaacgtgcaatcttgaaactgaggtgttagaaaacttgatctgtggtgttttgttttgttttttttcttaaaacaacagcaacgtgatcttggctgtctgtcatgtgttgaagtccatggttgggtcttgtgaagtctgaggtttaacagtttgttgtcctggagggattttcttacagcgaagacttgagttcctccaagtcccagaaccccaagaatgggcaagaaggatcaggtcagccactccctggagacacagccttctggctgggactgacttggccatgttctcagctgagccacgcggctggtagtgcagccttctgtgaccccgctgtggtaagtccagcctgcccagggctgctgagggctgcctcttgacagtgcagtcttatcgagacccaacgcctcagtctgctcatccgtaaagtggggatagtgaagatgacacccctccccaccacctctcataagcactttaggaacacacagagggtagggatagtggccctggccgtctatcctacccctttagtgaccgcccccatcccggctttctgagctgatccttgaagaagaaatcttccatttctgctctcaaaccctactgggatcaaactggaataaattgaagacagccagggggatggtgcagctgtgaagctcgggctgattccccctctgtcccagaaggttggccagagggtgtgacccagttaccctttaacccccacccttccagtcgggtgtgagggcctgaccgggcccagggcaagcagatgtcgcaagccctatttattcagtcttcactataactcttagagttgagacgctaatgttcatgactcctggccttgggatgcccaagggatttctggctcaggctgtaaaagtagctgagccatcctgcccattcctggaggtcctacaggtgaaactgcaggagctcagcatagacccagctctctgggggatggtcacctggtgatttcaatgatggcatccaggaattagctgagccaacagaccatgtggacagctttggccagagctcccgtgtggcatctgggagccacagtgacccagccacctggctcaggctagttccaaattccaaaagattggcttgtaaaccttcgtctccctctcttttacccagagacagcacatacgtgtgcacacgcatgcacacacacattcagtattttaaaagaatgttttcttggtgccattttcattttattttattttttaattcttggagggggaaataagggaataaggccaaggaagatgtatagctttagctttagcctggcaacctggagaatccacataccttgtgtattgaaccccaggaaaaggaagaggtcgaaccaancctgcggaaggagcatggtttcaggagtttattttaagactgctgggaaggaaacaggccccattttgtatatagttgcaacttaaactttttggcttgcaaaatatttttgtaataaagatttctgggtaataatgagtccttccggtgttcagtattcttgtctttgtgagtgcgtcccggggccgcctcggggcctgcctgccctcctgccaaagcctggaagaggattgaatggaccccagggtttggaaacaacctacagcatttgagcccctcacgtaggttttagagacgtacaatttttgtttgccctggctcagaaggagccggtgtaaggttgagataaaattccatatagacaactgagtttggatctcggctctgctgctttgtagctgtgggagttcaaacagcacctctttgagacttgggccccgcgtcggcacaatggggcaggaatagtcctgccagggtgactgtgtggatnaaggaggttggaanactgagnccacgcttggcactgggtaagccanactgag

SEQ ID NO: 200 - DNA, 2315 bp, Homo sapiens
ggccccccgcccctccagtgcatatcagtatcatggagggacattactatgatccactgcagttccagggaccaatctatacccatggtgacagccctgccccgctgcctccacagggcatgcttgtgcagccagkaatgaaccttccccacccaggtttacatccccaccagacaccagctcctctgcccaatccaggcctctatcccccaccagtgtccatgtctccaggacagccaccacctcagcagttgcttgctcctacttacttttctgctccaggcgtcatgaactttggtaatcccagttacccttatgctccaggggcactgcctcccccaccaccgcctcatctgtatcctaatacacaggccccatcacaggtatatggaggagtgacctactataaccccgcccagcagcaggtgcagccaaagccctccccaccccggaggactccccagccagtcaccatcaagccccctccacctgaggttgtaagcaggggttccagttaatacaagtttctgaatattttaaatcttaacatcatataaaaagcagcagaggtgagaactcagaagagaaatacagctggctatctactaccagaagggcttcaaagatatagggtgtggctcctaccagcaaacagctgaaagaggaggacccctgccttcctctgaggacaggctctagagagagggagaaacaagtggacctcgtcccatcttcactcttcacttgagttggctgtgttcgggggagcagagagagccagacagccccaagcttctgagtctagatacagaagcccatgtcttctgctgttcttcacttctgggaaattgaagtgtcttctgttcccaaggaagctccttcctgtttgttttgttttctaagatgttcatttttaaagcctggcttcttatccttaatattattttaattttttctctttgtttctgtttcttgctctctctccctgcctttaaatgaaacaagtctagtcttctggttttctagcccctctggattcccttttgactcttccgtgcatcccagataatggagaatgtatcagccagccttccccaccaagtctaaaaagacctggcctttcacttttagttggcatttgttatcctcttgtatacttgtattcccttaactctaaccctgtggaagcatggctgtctgcacagagggtcccattgtgcagaaaagctcagagtaggtgggtaggagcccttctctttgacttaggtttttaggagtctgagcatccatcaatacctgtactatgatgggcttctgttctctgctgagggccaataccctactgtggggagagatggcacaccagatgcttttgtgagaaagggatggtggagtgagagcctttgcctttaggggtgtgtattcacatagtcctcagggctcagtcttttgaggtaagtggaattagagggccttgcttctcttctttccattcttcttgctacaccccttttccagttgctgtggaccaatgcatctctttaaaggcaaatattatccagcaagcagtctaccctgtcctttgcaattgctcttctccacgtctttcctgctacaagtgttttagatgttactaccttattttccccgaattctatttttgtccttgcagacagaatataaaaactcctgggcttaaggcctaaggaagccagtcaccttctgggcaagggctcctatctttcctccctatccatggcactaaaccacttctctgctgcctctgtggaagagattcctattactgcagtacatacgtctgccaggggtaacctggccactgtccctgtccttctacagaacctgagggcaaagatggtggctgtgtctctccccggtaatgtcactgtttttattccttccatctagcagctggcctaatcactctgagtcacaggtgtgggatggagagtggggagaggcacttaatctgtaacccccaaggaggaaataactaagagattcttctaggggtagctggtggttgtgccttttgtaggctgttccctttgccttaaacctgaagatgtctcctcaagcctgtggcagcatgcccagattcccagaccttaagacactgtgagagttgtctctgttggtccactgtgtttagttgcaaggatttttccatgtgtggtggtgttttttgttactgttttaaagggtgcccatttgtgatcagcattgtgacttggagataataaaatttagactataaacttgaaaaaaaaaaaaaaaaaaaaaaaaaaaaaaag

SEQ ID NO: 201 - DNA, 890 bp, Homo sapiens
  misc feature (659): n equals a,t,g, or c
  misc feature (828): n equals a,t,g, or c
  misc feature (887): n equals a,t,g, or c
ggcacgaggcgccgcgcacctcatggttccggggacagttagggcggcggatggaggtcagcggtggtgctcgctgcggtttggaatcacttgctaggagtcttgtctctctgccacccaggacatcatggcagctcacctggtaaagcgatgcacgtgcctcctgagagaagctgctcgtcaggcccctgccatggctccagttggccgactgagacttgcctgggtagcccataagactctgacttcctcagccacctcacccatttcccacctcccaggttccttgatggagccggtggagaaggaacgagcatctactccctacatagagaagcaggtggaccacytcatcaagaaggccacaaggccagaggagctcctggagctacttggtggcagtcacgacttggacagcaatcaagcagcaatggtacttatccggctctctcacttgctgtctgagaagccagaagataaaggcttgctcatacaggatgcccactttcatcaacttctctgtctgctcaacagtcagattgcctcggtctggcatggtaccctctcgaagctgctgggaagcctgtatgctctgggcatccccaaggcctccaaggagctgcagtcggtggagcaggaggtccgctggcgcatgcggnaagctcaagtacaagcacctggccttcctggcagagtcctgtgccaccctctcacaggagcagcactcgcaggagctgctggctgagctgctcacacacctggaaaggcgttggacagaaattgaagattcccacacattagtgaccgtcatgatgaaggtgggacacntctcggagccataatgaaccgctggaagacaagcaagttcttgaacagagcgcaggacntca

SEQ ID NO: 202 - DNA, 1533 bp, Homo sapiens
  misc feature (863): n equals a,t,g, or c
  misc feature (872): n equals a,t,g, or c
  misc feature (911): n equals a,t,g, or c
  misc feature (1522): n equals a,t,g, or c
  misc feature (1524): n equals a,t,g, or c
cgatgctggaccattgatgggcacctcccgggacggagatacaactcgtcaacgaatcaaattcagtgatgacagagtatgcaagagtcaccttctcaactgttgtcctcatgatgtcctttctggaactagaatggatcttggagaatgtctgaaagtccatgacctggctttaagagcggattatgaaattgcatccaaagaacaagattttttctttgaacttgatgccatggatcatctgcagtcattcattgcagattgtgatcgtagaacagaagtggccaagaaaagattagcagaaactcaagaagagattagtgctgaagtagcagcaaaggcagaacgtgttcatgagttaaatgaagaaattggtaaattgttagccaaggtggaacaactaggagctgaagggaatgtggaggaatcccagaaagtaatggatgaagtagagaaagcacgggcaaagaaaagagaagcagaggaagtttatcggaattctatgccagcttccagttttcagcagcagaaacttcgagtctgtgaagtctgctctgcctatttaggacttcatgataatgacagacgactggctgatcattttgggggtaaactgcacctgggatttattgaaataagagagaagcttgaagaattaaagagagtcgtagctgagaagcaggagaaaagaaaccaggaacggctgaaacgaagagaagagagagagagagaagaaagggagaagctgaggaggtcccgatcacacagcaagaatccaaaargawccaggtccagagarcgatccaagaggaggtattgatgtgtcaatcagaggatatggagctaccttaatggtttagagntggttatgnttacttatggtacttatgtttagagttcagattattggnttgaaacttttgcatctggagatatgtacacatttatgtgtgggtgtacaacatttttctgtgattatatgggtagttttgaaagaatatacttatgagccagagcaagaaattggaaccaatatgtgtagaggttattgcttttctctgcttagtgtgtcttggaaaaaagttctttacaggtaaataattttaaataccaatacccttagtatggatcagcaaattaggggctctgagaagtcctttcattacaagagttgtttagctttgatttattgttttctaaacttatttgagctgggatgctttttcagagcagacacattctagtatattcttgttttatctgcactatagatatgtattgttacataccttcagcttggcaaggcagactaataatcttaaggaggttccaagacttcccttggtttaatgagaacattcaaaaggtgcaggcatagggtaaggtatgtttgaggacttgaatatctattaagaatagacaaaggattataatgtggtagaagagtttagcattcatagkctgtatagakcaaactgtcaaaagagctttcccgttagatttccccccttaaagtccccgngncactaaaga

SEQ ID NO: 203 - DNA, 2826 bp, Homo sapiens
  misc feature (285): n equals a,t,g, or c
  misc feature (2755): n equals a,t,g, or c
ggcacgagggggcgcctggcgctacgggtttctcgttggaggcggccttcgtggcagctgtagacgccgggaaaaggcataaagtccgttggccgacacctttctttcctccggcctcggtagaaccgccagcccgcgtccgaaggcggaggcgaggggaactggccgcgtgaggggcctgaggcgagcggttagagcgtctcccggaaggatgggccggtctcggagccggagctcgtcccgctccaagcacaccaagagcagcaagcacaacaagaagcgcancggtcccggtcgcgatcccgggacaaggagcgcgtgcggaagcgttccaaatctcgggaaagtaaacggaaccggcggcgggagtcgcggtcccgttcgcgctccamcaacacggccgtgtcccggcgcgagcgggaccgggagcgcgcctcgtccccgcccgaccgcatcgacatcttcgggcgcacggtgagcaagcgcagagcctggacgagaagcagaagcgagaggaggaggagaagaaagcggagttcgagcggcagcgaaaaattcgacagcaagaaatagaagaaaaactcatcgaggaagaaacagcacgaagagtagaagawttggtagcaaaaagggtggaggaagaactggagaaaaggaaggatgaaattgaacgagaagttctccgaagggtggaggaagccaaacgcatcatggaaaagcagttgctcgaagaactcgagcgacagagacaagctgagcttgccgcacaaaaagctagagaggtaacgctcggtccgtttggaaagtagagacagtccatggcaaaactttccagtgttgggttctgcctcctgctcagttcagaaagagatggaatacagactatctaattcctttctcgtctaaacttaacattgctgcgaaagttaattttttagcctattcagaagtgctgactgataacttaaaagttggaagcttttataaaacatattcaaggatactttttgatttaatggaactggctatttgagaagtgtttgaaacttttgccatggctgcaggacttacattcttttttgggaggacggtggggagacagggagtggtaaagggaaaaggttaaaaatccacctgtggttgtatattcttctattctgtcactctgttacctagactgtgagaggcttttgccttcagtcagattaaaaagagcagggcctaacattgagtgatagcacctgctttgataaataggttttctcactcttctttttttccttcttttatccctcactccctcccctaaaccctgcttcagcacaatggactaattctagcattctgatcataaggccctccattttcctaatgtgtttcaaggaatctttttaggaaaaatatccagattattcatccactttttttagtatctactaacaactcctttttttctctagagagttatgaaggaacaggttgtccttgtctggagtcaagctaaacacatgatttgttttatcagcagctggagcagaagttgaaaatgtctttctgtgagacagtaatttgctactgaagctttatggcttgtttgcactgattactccaggatccaaaaacttggtgaaagtcactgaaacactcaaggcaaattactttacagccctgagtgtctgtcaccatagtttgcataatgaatatgaatcccattggtgtgtgatgtaggaaatcctgtagttgtattttcttgaactgaaatatttgactcaaaataattaagactcattgtcatttttcatcttggcattattgtggacaagttgacatattaaatctctttgctttctsgtaagcttagcttttaaaatgcattttcccttgtcctgtctttaactagatatacatgcttatatttatagtgggtttcacagactataaaattgaatgtatgaaatttttatttatatcagtgcttttaataatgaagatatttttggagtaatggtgctgtcttgtagcgagttattaatcatagtaagatttttttctcttcatttgctttttttgtttcatattaacaattttttttttacacggacacaaccctctgacagtctttccaaatattaaaatcatttgaatatgtatgctgtgatctgaacactgctcaagccatcaagcagtcttcatacagtttgcattataaaatctcattaaattctccaagaaaaaataagttgaagaattttatttcctgaccatgcatcccctggatttctgagtttcagttcagattgtagatgacaatataagctgccttccgaaattgtcaacatctgaatgttaagtccattttccccatggaagaagcccgtagttccatgaagtatggattaccatttgtatttttcactaacagtaaatgtatttttcttattaattgtttgccttaggaatgatgaattacattttttgttccttcttaccataaacatctgcattcctcagctcagccttccttgtatgttgtttctttataaatggttgagctgctgatgcaggtattgccaagctaacagtacaaatcattttaaagaggaagctggcgcgtatggcagccgaggagcacactctgcaggacactggacaagacagtaaatattcaacttttaatgctgattaaaggagtataggtaaagaatacgtaggtatacataattggtgagacaaatattcactttatttatatttnatatataaaaaaaaaaatttggtwaatactatccagttttgtagttgtccttgttggtttgtgtggtatta

SEQ ID NO: 204 - DNA, 1538 bp, Homo sapiens
  misc feature (3): n equals a,t,g, or c
ggntgattaaatgtttgagtgatgttcctacttgtcatatacctcaacactagtttggcaataggatattgarctgagagtgaaagcattgtgtaccatcatttttttccaagtccttttttttattgttaaaaaaaaaagcataccttttttcaatacttgatttcttagcaagtataacttgaacttcaacctttttgttctaaaaattcagggatatttcagctcatgctctccctatgccaacatgtcacctgtgtttatgtaaaattgttgtaggttaataaatatattctttgtcagggatttaacccttttattttgaatcccttctattttacttgtacatgtgctgatgtaactaaaactaattttgtaaatctgttggctcttttwattgtaaagaaaagcattttaaaagtttgaggaatcttttgactgtttcaagcaggaaaaaaaaattacatgaaaatagaatgcactgagttgataaagggaaaaattgtaaggcaggagtttggcaagtggctgttggccagagacttacttgtaactctctaaatgaagtttttttgatcctgtaatcactgaaggtacatactccatgtggacttcccttaaacaggcraacacctacaggtatggtgtgcaacagattgtacaattacattttggcctaaatacatttttgccttactagtatttaaaataaattcttaatcmgaggaggcctttgggttttattggtcaaatctttgtaagctggcttttgtctttttaaaaaatttcttgaatttgtggttgtgtccaatttgcaaacatttccaaaaatgtttgctttgcttacaaaccacatgattttaatgttttttgtataccatawtatctagccccaaacatttgattactacatgtgcattggtgattttgatcatccattcttaatatttgatttctgtgtcacctactgtcatttgttaaactgctggccaacaagaacaggaagtatagtttggggggttggggagagtttacataaggaagagaagaaattgagtggcatattgtaaatatcagatctataattgtaaatataaaacctgcctcagttagaatgaatggaaagcagatctacaatttgctaatataggaatatcaggttgactatatagccatacttgaaaatgcttctgagtggtgtcaactttacttgaatgaatttttcatcttgattgacgcacagtgatgtacagttcacttctgaagctagtggttaacttgtgtaggaaacttttgcagtttgacactaagataacttctgtgtgcatttttctatgcttttttaaaaactagtttcatttcattttcatgagatgtttggtttataagatctgaggatggttataaatactgtaagtattgtaatgttatgaatgcaggttatttgaaagctgtttattattatatcattcctgataatgctatgtgagtgtttttaataaaatttatatttattaatgccwaaaaaaaaaaaaaaa

SEQ ID NO: 205 - DNA, 2342 bp, Homo sapiens
  misc feature (2338): n equals a,t,g, or c
ctatatgtgagactgacaaaaaccttaatgtaatttacttataatgccagaaggaaaacactattttcataccctactttttctgtacctaaattttcttaaaaaaaaatctagtatagcactacattcttttttaagtgatgcagaccttagtttctttagcccctttattttgaatacaatgctacatatgaatgttgaagctgatacattgcacagttctgtagacatcactacaccgatgtagtttctcaaattttagcaatatgctctacataaaatcactacagagatactagtggggaagacgrttaacacacctsttacagtaatactgcctgttattggtatagcagtggtatttgcagactgggatcataaggagcccttaaatacttgttattgactggggttatttttatgctgtagcaaatgtgacaggctctttttagcaaaatttttgaaaatttttttggtattactctgaaacaaaatttaagttggagtttcagggatttagggagtagttttcattctacatgaactgaggtaatattatggtaactccaatatttggttaaaaaaactatacaaatcagaatagtactaaaatactgtagaattttagcatttttattttgcactttgtgtggattgaggtgttcagaaataccaaccataaaaatgtaatctagttggcaaaggtgtgcgctaaaacacggaaccgaacatgcattgatttggataacttttgagggtttttgtcaaatagcatgtgaagagttacatttttcttaaaagattggtggtcccaatgtcagagttcttggaacagataactgaatgatagattttttttttttaaagataaaactttacaacctgcacatttgttatgcatactaaatggtgtgttaaaattagggtttctttgcctctctacactacactaatctgcctaaaggtggttgtttcatatttataatgctaattatcatacctacctactttaaattttaggtagaaaattatctgatttaaatacaaacatatttttctcacattgagtaatatgcataatgtagttccaaatgtatttcattactatagtcacaatatccaactaaaaattacgctatctagaattgtaccaaccaaaatctcgtattggcagatcttgacaggctggacctgcaagatgtggcttgaattttaaccatttattacataatctctagtgatcatgcatctagttatcataagaaataatttaaaaggttttgttgctgaaagcagtaagtggtgcagtaaaatacttaagttattcaaagaatgttatctttcttgcaagagtaatttaagcacatgggaaagattctagactttttgtttcttgcaacaacagtgccctctgctgctagaaacctttttctacttactatcatttttattgtggcttgagctcagtcaatctggtgcagatgaggctggacaactactaaccaataaaatcaggagtttgtacaaaagttaaatggaacattataattattttaagtaatgttaattgaaaaawttttttctttttgacaatataaaaaacattttaaatttcctagaaatgtcttcagggtaatgccaatttaagatctctcttaacttgtggccaagaaattctagattttccagctgactttggtataatatatatttatcaggaacttctctcagcagagagtacccattcttcgagttcaaagcacaattttaaacatgtaaaatggatatataatttgccaaaggtaattaatttattctttttttcttaaagaagaaaaagacattggttgttgttacaaaaagtctaaattactgttggttgaaacacagcagctgtggagttcagtccaggcatgaagactaaatctgctttaccaagtaaggtgtaaggttgcatgtttcagtcctctaccatcctgcactgtgagcagcactatacctgtgcgttgtctgaaagccttccgtatattctccagctaaatggtcgtctggtagcctttgcatttaacaaactagcatgaggctttttatatctaaatgctacgtgatagacaatttcagctagccacatattgtatgtatgagattcataaagactttcaatcatttcattttcagacaactgaaattttgtttagtatgtgaattctttttttgaaatgtatagtgaataggatgttgcactggtggcaattcatcatggagcataataaaattaatttgacccaaatagaawaaaaaaaaacgcaagggggggcccggtcccattcsccctatngtaa

SEQ ID NO: 206 - DNA, 827 bp, Homo sapiens
  misc feature (282): n equals a,t,g, or c
  misc feature (442): n equals a,t,g, or c
  misc feature (802): n equals a,t,g, or c
  misc feature (807): n equals a,t,g, or c
gtggagcaggacagatgctgcatccaaactcttccattgggttccagtctgttccagtcatgcccttgagcctctaaagctcctaggtgagagacgtagcagctgacagcacttcccacttgatttgggtggactccagcctccccagcaacaataagagatcaaaagcatcgttgaggaagcagcttgctgaaacgctgagtgcccgccactctcaggtcaggtgggaccggcaggccagcatgagttcctgaacacttggttctcaatactggccacagncacactgtaaggggaaacaagagggcgctgtatgcaaacatctcttgaactctggagtctgctcaccttcctgcctcaagcccctctcccacgtggtccagtcaccattctccacagagactaccctaaaacccagcgactctcgtgtgcctgcagaatngcacagcccgttctcatagcagcactcctgtttaatcagagggatgttaacgaccaagtcatatttgctcgatttgtgttcaatatatttcatttgtaccgataaaacttaaaaatatccccacacatgcattgcctattaaagagtatcttccaggtacacctcccttacacatcagttaacttgataatttcttcccattcttgtgcaataaatttccttcctgatcagctctgtccagcagcaacaataatccacgttagagacatgcaaactaaaagtccgttagtgggaggcacgaacttgatgaggcttggaaaaaaaatgaccgatttggattaaaattaggacccatggatnggganctcctgcctattttagaagc

SEQ ID NO: 207 - DNA, 2326 bp, Homo sapiens
  misc feature (404): n equals a,t,g, or c
gcgtccggtggtggactgagtaacagtcatttagagtcccccttctgtctctttaaaagcccctcggagggccacagttatcagaacagcggtctggaccacttccaaaacagcaacatagaccagagcttctgggagacctttggaagtgctgagcccaccaagacccgcaagtccccgagcagcgacagctggacgtgcgcggacacctccaccgagaggaggagctcggacagctgggaggtgtggggctcggcctccaccaacaggaacagcaacagcgacggcggggagggcggggagggcaccaagaaggcagtgccgccggccgtgcccactgatgatggctgggacaaccagaactggtagggcccactgcgcccccgtccccagcgcccccgggngacttcgtgtttgcactctgccctcgtcgttcctcctccttccatttgacccaagaatcagcaactgcagtgtgaggacagcgtctcgggaggcaggaccctagggagacccgggtgtgcgccgcctgcgcgtggggagtcttcggtgcgtgggggcggcttgctgtccagcctgtgtgggggccgtcccgtcccacactcccctgggcattcttggactcaaggccggggctctgcgtggcttgctgggaggtgggctgcagcacagaggcctgtgactgcgttccagcggccagttcactacgcagtatctctggggcctgggaccagccacgtgccgagctgtcagcgacgtgaggtgtcccttctcgttgagatatttaactttggttttgctctagttctttctttttgaagagagtgactggagtggtaaagatggaaatgctggaaatgatactggcgctcacgctgccatccgaccaccctcggctcccgagtccacgcctgcctgggcctgtgctgtcagacccgcgtcggtcgtaaccctctgtggctcccctgcatcagcaccgtcccaccaccaagttcaccaggttcaccagacacggcctccacaatagccacacccacacctgagctgttctcagtgctggaacttgaccatcctggaacaccctggaagaaaaaggagcgcagggtgggccctcggcctgatgcaggagggtgcgatacggacgtggccaggcaggaggggccgggttcaggagctgagcaggggatgcctgtgcgtggtgcctgggtctagggaagctccagccccaggatgggctgccctgcacaccggtgcccgccacatgccaaccctcacctccccgaggactggatgatgtgctgccacgtgtgactcgtctcccttgtctgccctgtgtgaccctcagtcttggccagccatgcatgcgcccgaagctcgtgcagtttgtacgtgaggtgctctcctccctgccaccatgctcatcactctggccttggccatgctccctggtcaccccacttcccggtcgccgtctgcagcactcctggagcagcctgggcccttcagcccctgtgctcgtcccaccctagggactcagccacttgcagaacaggatgggaccgagatttcagcgagccctcctggcgcccggtcctccctgtgggcaccagccctcttggtagctggtgtggagggccggtgtccttggctgccacggagggatttgatcaccgaagcagccacctgctgtagttggacctgaggtcagaggcggggcatcagaggctcaaggtgctgagaagccaccgggaaagcagccagcacaaagggcccaggaagccagcccccgagagctgagcgtgggggtctttgagtgtctttctccaagctgagacgtgggcggccgcgtggtatctcccgagggctgcttggaccctggtgggctgagtgctccgaggaggggtggactccaccttggacagtgggatgtggtgttccacatgtgcctgtttccacgccagcaccttgacttggcagcatggagccaaggtctgtccccgcccaggagggtgccttcctcgggggtagggggacggcccactctgccccagggagtcccttttgatgggaagtgcagtcagcagcgtggaggtgtctgggccaccttcagaaggtggatgtggtggccgagaccccgtccacggagggtgatggcctttcccttctgcaggtgcgggcaggtgggcctgggaccggtgctggggcctctccttgctgtgtgtgagggcccaggtggaaggcgcggacctgacagcattccaataaagcatacgggaacatgmaaaaaaaaaaaaaaaaaaaaaaaaaaaaaaaaaaaaaagggggg

SEQ ID NO: 208 - DNA, 1462 bp, Homo sapiens
  misc feature (1445): n equals a,t,g, or c
  misc feature (1453): n equals a,t,g, or c
tctctctctctctctctctctctctctctctctattagctggtactttggtgatttctattactagtttttctaagctatttacagagtgtttgtagctttcatttgcagcattatgttcccacaaattctgtactcagcatatacagtatagtttatctgctctatttctgtcttatagaaatcatgaatgtggtctgcagacattgatgaagaaaatctgttggtaattgatacatgggctaaagcatcagaggtttaatttgaagtttatgttcacacactgaaaacttagtttttttgttggtagatccatgtgcatgctagaatttgggacaggcactatttgcataaagtattaaagtcaatttttaaactaagcaaaggtacacgttgtaacggtggggcatctgtgaaaaagatgtccctttcataatatatgcaatatattccagatgttttgagagattacagaagaggaggcctgcttcacttgcagataagtttattataattctccagaaatgtgcaggatgtgcattagcaaattgcactgtacttttcactccagcctgggtgacagagcaagactcccgtctcgggggcttaaaaaaaaaaaaaatgctgtatctaaatgaatctgtgtaattgggcccagatgtgggtttgctcagtattagtagacaaggtctttgttcagacgattaggtgcctaactggcaaatgccttagtttcttaaaacgtattttctgatgtggctttacatttcaaaagtgaacttgattcaacctgagaaaactgattaaaaaattagtttaaatttgccagcagggaagtaaaataattatgggaagagtgtcttaagcctaatattaaatcagttttgttaaggggaaaactcaatagttctgttacttaggctgttagatccaagttgatttttgtgtctacagctaaattttgtttacaattaggctattttttaatataggatttagaaaccaagggtatgtgttttaaaattacactttttcttaacctgtctagctgtcggaaaaggtaacagaagatggaactcgaaatcccaatgaaaaacctacccagcaaagaagcatagcttttagctctaataattctgtagcaaagccaatacaaaaatcagctaaagctgccacagaagaggcatcttcaagatcaccaaaaatagatcagaaaaaaagtccatatggactgtggatacctatctaaaagaagaaaactgatggctaagtttgcatgaaaactgcactttattgcaagttagtgtttctagcattatcccatccctttgagccattcaggggtacttgtgcatttaaaaaccaacacaaaaagatgtaaatacttaacactcaaatattaacattttaggtttctcttgcagatttttggggttaggcccggtngggcccanggtttttgc

SEQ ID NO: 209 - DNA, 2581 bp, Homo sapiens
  misc feature (2090): n equals a,t,g, or c
  misc feature (2566): n equals a,t,g, or c
  misc feature (2572): n equals a,t,g, or c
tcgacccacgcgtccggagaagtagtaaaaccagctgcagtgttatcaaagggtgaaatagtggtgaaaaataacccaaatgaatctgtaactgctaatgccgctaccaattctccttcatgtacaagagcagatcctaaaaatgttagtataccatcttctgaagctttatcttcggatccttcctacaacaaagaaaaacacattattcatcctacccaaaagtctaaagcatcacaaggtagtgaccttgaacaaaatgaagcctcaagaaagaataagaaaaagaaagaaaaatctacatcaaaatatgaagtcctgacagttcaagagcctccaaggattgaagatgccgaggaatttcccaacctggcagttgcatctgaaagaagagacagaatagagacaccgaaatttcaatctaagcagcagccacaggataattttaaaaataatgtaaagaagagccagcttccagtgcagttggacttggggggcatgctgacagccctggagaagaagcagcactctcrgcatgcaaagcagtcctccaaaccagtggtagtctcagttggagcagtgccagtcctttccaaagaatgtgcatcaggggagagaggccgccgcatgagtcaaatgaagaccccgcacaatcccttggactccagcgccccactgatgaagaaagggaagcagagggagatccccaaggccaagaagccaacctcactgaagaagattattttgaaagaacggcaagagagaaagcagcgtctccaagaaaatgctgtgagtccagcttttaccagtgatgacacacaagatggagagagtggtggtgatgaccagtttcccgagcaggcagagctgtcagggccagaggggatggacgaactgatctccactccttcggttgaggacaagtctgaagagccaccaggcacagagctccagagggacacagaggcctcccaccttgctcccaatcacaccaccttccctaagatccacagccgcagattcagggattactgcagccagatgcttagtaaagaagtggatgcttgtkttaccgacctactcaaagaactggtccgtttccaagaccgtatgtaccagaaagatccagtcaaggccaagactaaacgtcgacttgtgttggggttgagggaggttctcaaacacctgaagctcaaaaaactgaaatgtgtcattatttctcccaactgtgagaagatacagtcaaaaggtgggctggatgacactttgcacacaattattgattatgcctgtgagcagaacattccctttgtgtttgctctcaaccgcaaagctctggggcgcagtttgaataaggcagttcctgtcagtgtggtggggatcttcagctatgatggggcccaggatcagttccacaagatggttgagctgacagtggcggcccgacaggcgtacaagaccatgctggagaatgtgcagcaggagctggtgggagagcccaggcctcaggcacctcccagcctacccacacagggccccagctgccctgcaraagatggccccccagccctgaaagaaaaagaagagccacactacattgaaatctggaaaaaacatctggaagcatacagtggatgtaccctggagctagaagaatccttggaggcttcaacctctcaaatgatgaatttgaatttatgagagttcttgcctgtgtgtctgtattttgggtaaggargggaggtctgaaaaagactttggggctttttcttctgtttttcatgacaatgtaatttgtgtaactgttgaatctggaaattgatcagcattaaagggcacatgaagcagtgtctgcaggcgttcagtgctgcggacctgttaaaggtcactcagatgtgcaggtgttaatcttctctaaaagcctggtgatacagctctggctttctgagcacactacggatctggaaaatactggaaaatgtgatacttagaatactttggctgctaaggaaacttcctctccattgcagaatagctgagccaagtgagtgagtttgcagaaagcaggtggtgagctcctgcctgctggnaggttgccatggagggccattcctgcccggcaacagcaccgtcctgcagggagccacttggcagaagggtgcagggctgctggtgtcagagcaagagggctacagggaaagggccctttctcaggggatgtagcttttttaaaagatttgggaacacttggaggatttgctaaaatgagcctcagaaggaaaattggttttcctaacctgtgactttttgaaatgaattattccyttcagtctttatttttcaaagaaacaatgtgtattgaagtacctagatttgtttgataatcaacaaatctttcctttttcaatgaacatattctgaatgtggtttctgtcttagaccaggaggacagagtttgctttcatattttccctgtaagtaagagggcttatttattttaaataaagagtaattattaaaaaaaaaaaaaaaaaaaaaaaaaaaaaaaaaaaaaaaaaaggggggncccccnaaggggccc

SEQ ID NO: 210 - DNA, 1994 bp, Homo sapiens
cagggctccccagagagcctcttccctccccaagtacctgagaaagatgagagaggcacgtgctctgctgggaaggtccagtgagcggttcaagggcctggaatctccctacggccaagtctaagggttctgggattctgggctttgtgggctttgcttgcttgctgggaatgggctttccctgtcccgccctgccccacctcgcctctgtctctcagaagctccagaacccagcagtgacctgcaaaatgtggcctctgatgggggcttagggtgggagatggggagagcctacattgtcttttgctccttgaaaactttaatagctcctattttccagagaatggtgctttgtgagcaacatgcgagtaagagagaaataggaggaagggggagtaggggcggatgggagaagagtggctcatttttacctctcactgccttgacattttgtgaacgtgaagcttaaactttctgggcttacaagacccaggggcacgtcagctccttagatgggctcagcctgacacataattcttaaacctttcctgtttaagaaacttctagaggctgtgtactctcaccaatcctcttcgagaatttgttcatgtgtatttccccattatatggatgaggctcaggataacagcatagtggctaccttctactgagttttgaggtgctaataagtatgtttgtctgaggctgcacatgtgggtggctctgtgtgtatgatccaagggacaaaatgacgatgtaggaaccagcaagaacggaatctgggctgatgcttcagtctccacctgggtgatggctagcctcccgccctccaccaccgcatcccacacgtgctgcgcactgtccccgtgtctcctggagaaccaaactggagaaaacctttctgagtatctctcatagtaccccttccttaagaagatgtggtttagagcatgtgtgcaatcctgcctctgtaattaggaaacggagcccgaggctttccattgttggttgaacccaggacagctggtgctattcacaggctgaagaactgggcagttcttacttgggtctgtcctaggatgtggaggaagttcaggactaacgctaggcagagagtatgactcggtttacccagcctaggggcctctggatgggaacactccattccaagatctcagcagagcagggcttcctggcttgaggctggaagcttttgggaagaggcccagctgggacattccctgggcacctgtcttccgctgaagggagcaaggtgccctctgggactgacagccatgaccctctgtgccatcctcaatccttgagccatatatcaagagtcctctagagcyggatggtcctcaaaagtctgtccaaggaatgccaacgttcaccgggctctgagaaacgacgcaaatctctgagctggggaccacttggagaaccggcttagtaacagtcctgatcttcgcaagccagcttcttctgcatctgaggggctcctggcgcccagaggaggcagacagatgtcttctagctgagtttctaaccgcatgatgagactcagaccttccgctgcactagaaaatctgcaacagtgtccctgagtcacttctccttagtgggcagactcgtgttagatttgtggaacccagctctctgatttactccttttggaaaacccatggaatttcatgtataaggctttcatttgtattttaaggtttttctgtttgttttgagtatatacatggtgctcaatagcaacatcttagcagatgaagcagtttatgattccactccctcctgtatgacaggtagccactatactgaatcaaggtgctgaactcaaatcacaaaattctggcttaccgatacaacaaccaatacatctttgttctgtaatrwaaaatttgactccttacttttataacttattaaagttaaaatgtctgtgtttttgcaaaaaaaaaaaaaaaaaaaaaaaaaaaaaa

SEQ ID NO: 211 - DNA, 1514 bp, Homo sapiens
  misc feature (691): n equals a,t,g, or c
  misc feature (866): n equals a,t,g, or c
gcaaccagaggcttctaaacaacctaccctccttccccattttctgtggtccaactaccctcggcgatcccaggcttggcggggcaccgcctggcctctcccgttcctttaggctgccgccgctgcctgccgccatggcagagttgggcctaaatgagcaccatcaaaatgaagttattaattatatgcgttttgctcgttcaaagagaggcttgagactcaaaactgtagattcctgcttccaagacctcaaggagagcaggctggtggaggacaccttcaccatagatgaagtctctgaagtcctcaatggattacaagctgtggttcatagtgaggtggaatctgagctcatcaacactgcctataccaatgtgttacttctgcgacactgtttgcacaagctgagaagtggtatcttaagctacagacagacatytytgaacttgaaaaccgagawttattagamcaagttgcagaatttgaaaaagcagagattacatcttcaaacaaaaagcccatcttagatgtcacaaagccaaaacttgctccacttaatgaaggtggaacagcagaactcctaaacaagggaaattttaagacttcaagaagagaatgagaaattgaagtcaaggttgaagaccattgaaatacaggctacaaatgcactggatgaaaagtcaaaactagnaaaaagcactgcargatttacagcttgatcaaggaaatcaaaaggrttttwtaaaggcccaagrcttwagtaacttagaaaacactgtcgctgccttaaagagtgagtttcagaagacacttaatgacaagacagaaaaccagaagtcactggaggagaatctggcgacacaagncacgatctactcagggttcaggagcagctgcacatggctgaaaaggaattagaaaagaaatttcagcaaacagcagcttatcgaaacatgaaagasattcttaccaagaagaatgaccaaatcaaagatctgaggaaaagactggcacaatatgaacctgaagattaaaactgaagatttcctctggaagctaccacatgcaaacatacaagcagtctcacctcaggcatgtattttgaaaagcattttgtcatatcccctctccttatttttctaatatttagactttgaatatttagaactagagttcctattttcagctagttgaaaacagagaaaacctagtgattctgtctggtcatcccacacacctctctactgagtgctccagagtcttagctcacatgcactgagaattctttacagcaaagaagagatttttagagtgggaagaagaggcttatccttctgcattagtataaagagtctgtatttttaataaatgttaaataagctaacaatgtttgtacttatgcattccccatgggtaaaaataaataatagcattgttaaagatagttattaccaaaaaaagagagttattacaaataaatatgtctctttatttttaaaaatgaaatcttaatt

SEQ ID NO: 212 - DNA, 483 bp, Homo sapiens
  misc feature (444): n equals a,t,g, or c
  misc feature (469): n equals a,t,g, or c
cccacgcgtggrcagaccgcgcagggagcacacaccgccagtctgtgcgctgagtcggagccagaggccgcggggacaccgggccatgcacgcccccaactgaagctgcatctcaaagccgaagattccagcagcccaggggatttcaaagagctcagactcagaggaacatctgcggagagacccccgaagccctctccagggcagtcctcatccagacgctccgctagtgcagacaggagcgcgcagtggccccggctcgccgcgcyatggagcggatccccagcgcgcaaccaccccccgcctgcctgcccaaagcaccgggactggagcacggagacctaccagggatgtaccctgcccacatgtaccaagtgtacaagtcaagacggggaataaagcggasgrrggacagcaaggagacctacaaattgccgsamcggntcatcgagaaaagagacktgacggnttaamgaktgatcg

SEQ ID NO: 213 - DNA, 883 bp, Homo sapiens
  misc feature (869): n equals a,t,g, or c
  misc feature (870): n equals a,t,g, or c
tgcagcaagagggccccgctgaccaggtggctgcagatgtaaaatctggcaactatacagtgttacaagttgtggaagcccttgggtcctctctagagaatccagaaccccgaactcgggcacggsaatccagcttttgtcacaggtgctactccactgtcacaccttgctcctggagaaggaagtggtacacctgatactgttctatgagaaccggctgaaggaccatcatcttgtgatcccatctgtcctgcaggtttgaaggcacttagcctgtgtgtggccctgcccccagggctggctgtttctgtgcttaaagccatcttccaggaagtgcatgtacagtccctgccacaggtggaccgacacacagtctacaatatcatcaccaattttatgcgaacccgggaagaagagctaaagagcctaggagctgacttcacctttggcttcatccaggtgatggatggggaaaaggatccccgtaatcttctggtggccttccgcatcgtccatgacctcatctccagggactatagcctgggaccctttgtggaggagttgtttgaagtgacatcctgttatttccctatcgattttacccctccacctaatgatccccatggtatccagagagaagacctcatcctgagtcttcgcgctgtgctggcttctacaccacgatttgctgagtttctgctgcccctgttgattgagaaagtggattctgaggttctgagtgccaagttggattctctacagactctgaatgcttgctgtgctgtgtatggacagaaggaactgaaggacttcctccccagcctttgggcttctatccgcagagaggtgttccagacggcagtgagcgnntggaggcagaggg

SEQ ID NO: 214 - DNA, 4799 bp, Homo sapiens
  misc feature (1164): n equals a,t,g, or c
  misc feature (2403): n equals a,t,g, or c
ttaacctcctttccctcccatcttctttcattaacccctcctaaggcatgtaatttgaaagcaattgagacgcaaccgaactttgcagtagcttggagtaatcttggctgtgttttcaatgcacaaggggaaatttggcttgcaattcatcactttgaaaaggctgtcacccttgacccaaactttctggatgcttatatcartttaggaaatgtcttgaaagaggcacgcatttttgacagagctgtggcagcttatcttcgtgccctaagtttgagtccaaatcacgcagtggtgcacggcaacctggcttgtgtatactatgagcaaggcctgatagatctggcaatagacacctacaggcgggctatcgaactacaaccacatttccctgatgcttactgcaacctagccaatgctctcaaagagaagggcagtgttgytgaagcagaagattgttataatacagctctccgtctgtgtcccacccatgcagactctctgaataacctagccaatatcaaacgagaacagggaaacattgaagaggcagttcgcttgtatcgtaaagcattagaagtcttcccagagtttgctgctgcccattcaaatttagcaagtgtactgcagcagcagggaaaactgcaggaagctctgatgcattataaggaggctattcgaatcagtcctacctttgctgatgcctactctaatatgggaaacactctaaaggagatgcaggatgttcagggagccttgcagtgttatacgcgtgccatccaaattaatcctgcatttgcagatgcacatagcaatctggcttccattcataaggattcagggaatattccagaagccatagcttcttaccgcacggctctgaaacttaagcctgattttcctgatgcttattgtaacttggctcattgcctgcagattgtctgtgattggacagactatgatgagcgaatgaagaagttggtcagtattgtggctgaccagttagagaagaataggttgccttctgtgcatcctcatcatagtatgctatatcctctttctcatggcttcaggaaggctattgctgagaggcacggcaacctgtgcttagataagattaatgttcttcataaaccaccatatgaacatccaaaagacttgaangctcagtgatggtcggctgcgtgtaggatatgtgagttccgactttgggaatcatcctacttctcaccttatgcagtctattccaggcatgcacaatcctgataaatttgaggtgttctgttatgccctgagcccagacgatggcacaaacttccgagtgaaggtgatggcagaagccaatcatttcattgatctttctcagattccatgcaatggaaaagcagctgatcgcatccatcaggatggaattcatatccttgtaaatatgaatggctatactaagggcgctcgaaatgagctttttgctctcaggccagctcctattcaggcaatgtggctgggataccctgggacgagtggtgcgcttttcatggattatattatcactgatcaggaaacttcgccagctgaagttgctgagcagtattccgagaaattggcttatatgccccacactttttttattggtgatcatgctaatatgttccctcacctgaagaaaaaagcagtcatcgattttaagtccaatgggcacatttatgacaatcggatagttctgaatggcatcgacctcaaagcatttcttgatagtctaccagatgtgaaaattgtcaagatgaagtgtcctgatggaggagacaatgcagatagcagtaacacagctcttaatatgcctgttattcctatgaatactattgcagaagcagttattgaaatgattaaccgaggacagattcaaataacmattaatggattcagtattagcaatggrctggcmactactcagatcaacaataaggctgcaactggagaggaggttccccgtaccattattgtaaccacccgttctcagtacgggttaccagaagatgccatcgtatactgtaactttaatcagttgtataaaattgacccttctactttgcagatgtgggcaaacattctgaagcgtgttcccaatagtgtactctggctgttgcgttttccagcagtaggagaacctaatattcaacagtatgcacaaaacatgggcctgccccagaaccgtatcattttttcacctgttgctcctaaagaggaacacgtcaggagaggccagctggctgatgtctgcttggacactccactctgtaatgggcacaccacagggatggatgtcctctgggcagggacccccatggtgactatgccagggagagactcttgcttcytcgagttgcagcatcccagctcacttgncttaggttgtcttgagcttattgctaaaaacagacaagaatatgaagacatagctgtgaagctgggaactgatctagaatacctgaagaaakttcgtggcaaagtctggaagcaaagaatatctagccctctgttcaacaccaaacaatacacaatggaactagagcggctctatctacagatgtgggagcattatgcagctggcaacaaacctgaccacatgattaagcctgttgaagtcactgagtcagcataaataaagactgcacaggagaattacccctatacctgagcctcaaccttctgggggaaagggaactagataacatacttcttacttgtctgtacagtaccttgttgcagatgggtgatatataatggtaatagaatagcacagccagacttgcttcctgcatggtagggagagacacaaaagatgggaaactgcttttccacaaggaatctccgtagaattttgcggcgaccagatggtgcataggtctggaaggtctgatctcccttggtcttccatgggatggttagtgtggaggggagatatagattgtccggccgctttgtgattccatggattgattcagtcttctggatttttttttctttatattttgggtactggagcttttaaaaatgtttggtttcaggtatttttattcatgtgaagtgtatatgattctcttgagataaggttttaagctaaaatgttactccctgttttagtttctgaactctgacagattgacagggactttgctggtgtagtctttttataggttttataaaccacttgagcctatatcagtcgttttagtgtctgacctaatatttggagctatcagtgctttgttgatttagatgatgactcaagattttttctggtccatttcccatttccttttcttccctgacccccataccctcacccttaaaattctcctgtaactcaactaacaaaatcaagcctgattcaaaacatcctagggtgttttaaacacaccatctggtgccaaatgaagatttttaggagtgattactaattatcaagggcacagttgtggtactgtcattgataataatatagtttttttttttttcctaattttgacctgtttcaccagtgttttacccttgactgccccttctatgctgcttccaaaagtgatagtgtgtgtaagatttttaccttcctttctaaagttttttttttttttttttaagtgagtcctgttcttcctatttctttcagcagaaatgaaatcccaggtaagtataagtattcaagtatttgatcagtaagtcacagttatctccagtgcattaaataaccttcatcaagaaataggttataggtaaaatctctgaaggatcatctatgtattcaagtaattattttttagataataactgtcttctggacttggtcttgaagtctgtacagattcagcctcagtagtagcgaactgcactgctgtttggtttggagtacaaattagacttatagtcctcctggaacttgagttattaaaatcataggaataaaattatgggatctcaacaaagggtcgagggtttgaggcttaaacaagccaacatatgaatatatgttttgtctcgctatactgcacttacgctatccagttgcaggtaattttttgtctgctagtagtgttctagattatgtctttccaaagcgctgaggctgtgcacctattctgtagttgcagctgatgcctgaatgtatcctagctgacaaattattgattaataagaacttgaatttctggaagattcttactgttaaccaaattttgagcaaggagtctcaaaggtaattctgaaccagaattacatgttaatgaacagtgtaccttttaacagtgtaaatcacggaatatccgtgaagggatttcttaatttattttttaccggttgattgaaatatcagttaaaggttgccagcatggttgcagataaactgatgtttgaaattcgctgaaatacttaatgtggaataggataatatacttccaatgccctcaaggctgtgaccttacagccattttacatagcacatcattcctcctatagggatgaactttttcctggcacgaaaagtagccgctctggttgaagctttgcttattgtaacaggcttttatttccaggtaatatgtcttggaagacttaattctgattagagatatagatattactggaaactaattgttttttttctattgtactctgctttatcaaagaagtaaaacatttaaatcgtactacagaaattaagatgttgtcttgcgatccttaataaatgaatgatttccctttaaaaaaaaaaaaaaaaaaaaaaaaaaaaaaaaaaaggggggggg

SEQ ID NO: 215 - DNA, 1045 bp, Homo sapiens
  misc feature (965): n equals a,t,g, or c
  misc feature (987): n equals a,t,g, or c
gcgggatcccgctggctcgccgtcggctgccggggggttggcckgggtgtcattggctctgggaagcggcagcagaggcagggaccactcggggtctggtgtcggcacagccatggcgggcgcgttggtgcggaaagcggcggactatgtccgaagcaaggatttccgggactacctcatgagtacgcacttctggggcccagtagccaactggggtcttcccattgctgccatcaatgatatgaaaaagtctccagagattatcagtgggcggatgacatttgccctctgttgctattctttgacattcatgagatttgcctacaaggtacagcctcggaactggcttctgtttgcatgccacgcaacaaatgaagtagcccagctcatccagggagggcggcttatcaaacacgagatgactaaaacggcatctgcataacaatggaaaaggaagaacaaggtcttgaagggacagcattgccagctgctgctgagtcacagatttcattataaatagcctccctaaggaaaatacactgaatgctatttttactaaccattctatttttatagaaatagctgagagtttctaaaccaactctctgctgccttacaagtattaaatattttacttctttccataaagagtagctcaaaatatgcaattaatttaatamtttctgatgatggttttatctgcagtaatatgtatatcatctattagaatttacttaatgaaaaactgaagagaacaaaatttgtaaccactagcacttaagtactcctgattcttaacattgtctttaatgaccacaagacaaccaacagctggccacgtacttaaaattttgtccccactgtttaaaaatgttacctgtgtatttccatgcagtgtatatattgagatgctgtaacttaatggcaataaatgatttaaatatttgttaaaaaaaaaaaaaaanaaaaagggcgggcgctctagangatcctcgaagggccaagcttacgcgtgcatgcgacgtcatagctctctccctatagt

SEQ ID NO: 216 - DNA, 1164 bp, Homo sapiens
  misc feature (1140): n equals a,t,g, or c
gagcatttaggctttgttctccaagaactgggatatccattcttaccctacagtggcttgatgcctttctgaaggcgagagggaagcctgggtgactcagcggtggtctccattcagcaaaatctcatgtacatttccagtaggaaccgcagaggtgtgcttttcaagactcaccaaatactgtgttttctctcttaggatttcttttcccctaaagtatcacggaagatactatggttcgtgactttcttgctaactgaagaagccaaggatttggggtgtggggtcgtatgcgagacacagtggggtaagggtgcataccccaccccttacctgctctcatactgcagttacatttacaccaaaaccccatgcagggttctttgtggtgagtgttccatacgtgctaaggaccttagttgcagattgttactttctggtgacctatgttgaattgaaacccccaaaacttgaaattgtgaacatttgacatgcagtaaaggccacctcatcacccagagaaatctttggctgctgcagctagccgcttcttggctgtratgtagtatagcttcgatctcattttgtgtttgagagaatgttctgggcaagttctgtgtgtggtgggttggggcggtagagtcaygagttttccacatccctgtgtggtggttttgctgactgtcgctccgtgggactggctcccgtttctccttggtgagcccggggagccggcgcatcttgtgagtcgcgtctgtgcatggcgatccgctcctccggctctcatggcattgtgccacaggcagaggccaggaggagcagtatgtgcacagccgaaacattttacattttttacattgtttttcttttttaaccaactcattgtttaaaaaacaaaaacaaaaaaaacctaatctgtgaaatcagcgtagcatgcctggagcatcaggaatggcagaaaagtctgatgcgctctagacagcttcaccactcatttgggcaggcagtaaacacacatatratttattagctgggactgaactggctgtgaaatctatgawttgctttgaacatttgggttttgtttgccyttttccytaatttgatacacaaaaaaaaaattccatcaaaaactgttgnaattcattgaaggtctgtgtttcc

SEQ ID NO: 217 - DNA, 1594 bp, Homo sapiens
ggcacgaggtgagagaagggcagtttcctgcattggaacctggagcaagcgctctatctttcacacaaattccctcacctgagattgaggtgctcttgttactgggtgtctgtgtgctgtaattctggttttggatatgttctgtaaagattttgacaaatgaaaatgtgtttttctctgttaaaacttgtcagagtactagaagttgtatctctgtaggtgcaggtccatttctgcccacaggtagggtgtttttctttgattaagagattgacacttctgttgcctaggacctcccaactcaaccatttctaggtgaaggcagaaaaatccacattagttactcctcttcagacatttcagctgagataacaaatcttttggaattttttcacccatagaaagagtggtagatatttgaatttagcaggtggagtttcatagtaaaaacagcttttgactcagctttgatttatcctcatttgatttggccagaaagtaggtaatatgcattgattggcttctgattccaattcagtatagcaaggtgctaggttttttcctttccccacctgtctcttagcctggggaattaaatgagaagccttagaatgggtggcccttgtgacctgaaacacttcccacataagctacttaacaagattgtcatggagctgcagattccattgcccaccaaagactagaacacacacatatccatacaccaaaggaaagacaattctgaaatgctgtttctctggtggttccctctctggctgctgcctcacagtatgggaacctgtactctgcagaggtgacaggccagatttgcattatctcacaaccttagctcttggtgctaactgtcctacagtgaagtgcctggggggttgtcctatcccataagccacttggatgctgacagcagccaccatcagaatgacccacgcaaaaaaaagaaaaaaaaaattaaaaagtcccctcacaacccagtgacacctttctgctttcctctagactggaacattgattagggagtgcctcagacatgacattcttgtgctgtccttggaattaatctggcagcaggagggaacagacttatgtwaacagagataaaaattaattttcaatattgaaggaaaaaagaaataagagagagagaaagaaagcatcacacaaagattttcttaaaagaaacaattttgcttgaaatctctttagatggggcttatttctcacggtggcacttggcctccactgggcagcaggaccagctccaagcgctagtgttctgttctctttttgtaatcttggaatcttttgttgctctaaatacaattaaaaatggcagaaacttgtttgttggactacatgtgtgactttgggtctgtctctgcctctgctttcagaaatgtcatccattgtgtaaaatattggcttactggtctgccagctaaaacttggccacatcccctgttatggctgcaggatcgagttattgttaacaaagagacccaagaaaagctgctaatgtcctcttatcattgttgttaatttgttaaaacataaagaaatctaaaatttcaaaaaa

SEQ ID NO: 218 - DNA, 1545 bp, Homo sapiens
  misc feature (1512): n equals a,t,g, or c
  misc feature (1525): n equals a,t,g, or c
  misc feature (1544): n equals a,t,g, or c
tgataatcatggcgcccctcggaacaactgtattgctgtggagcctcttgaggagttctccgggcgtggaacgggtctgtttccgggctcgaatccagccctggcacggtggcctgctccaaccgctaccttgctctttcgagatggggctgccacgccgccggttcagctccgaggccgcagaatctggtagcccagagaccaagaaacctacatttatggatgaggaagttcaaagcatactcacgaaaatgacaggcttgaacttgcagaagacttttaagccagctatacaagaactgaagccaccaacctataagctaatgactcaggcacagttggaagaggctacaagacaggcagttgaggcagctaaagtacgattaaaaatgccaccagttctggaagagcgagtaccaataaatgatgtgttagctgaagataagattttggaaggaacagaaacaaccaaatatgtgtttactgatatatcatatagcataccacaccgggagcgttttattgtcgtcagagaaccaagtggcacactacgcaaagcctcttgggaagaacgggaccgaatgatacaagtttatttcccaaaagaaggtcgtaaaattttgacaccaataattttcaaggaagaaaatcttaggactatgtatagccaggacaggcatgttgatgtcctcaatctctgctttgcccagtttgagccagattccacagagtatatcaaggttcatcacaagacctatgaagatatagataaacgtggaaaatatgaccttttacgttcaacaagatactttggtggaatggtgtggtattttgtaaataataaaaagattgatggtttgctgattgaccagattcagagagatttaatcgatgatgcaaccaacttggtccagctgtatcacgtgctccatccagatggccagtcggctcaaggggccaaggatcaggctgctgagggaataaatttaatcaaggtctttgcaaaaacagaagcacagaagggagcctatatagaactaacactgcagacttatcaagaagcactcagtcgccattctgcagcttcctaaaaatattttaaaaatacatttattttactaaatactgactacatttctctgttaatattgagctaaatgttaaaaaatggccagattaaaagatatcaatttgtagttctccctamaaarmaaaaattattaccctactcacttttcgtaggctacaaggatatttgagtgcctggttatgaatttctcaaatcatgttagatgagcgtacggttaaaaagtctggtgtgtttttgtgttaccaaatagggcaaacgttaacttagacagacccccagcttaatgaggtcagaggaacagaggtttcacatcctgactccagaaatgggtagctgctagacaaaatcggggcaagacctgtggaatgatgccatgaggtcaagaaaaagggtttagagaattacagccggatattcagccnaagaaaatgtgantgacacattgaaatgccgnt

SEQ ID NO: 219 - DNA, 462 bp, Homo sapiens
aagctatttaaagtaaaggatttgtttcaaatcaatgtatgtccacaaattaacattaatgtttacaatactttctgtgataattgtgtcttacttgggtgtatatatgtctttatatctatctgtaaagatatagttgcaagtagatgagagacgaatgttcatgtttctatatggtctgaataaaagtgttatcactatgctaacttgcagtgttataaaatgcaccaatggctctttgtgccactccttcattttcagtggttaccaagatagtcaaattaaactgctgatgtgataatcatccaaacatttaattttaacactatgattatagaatttytttatttctatgagatttacctatagtagctttctgtttaakgtycaatgttctataggagtttccttttaaatgctcagagcaggagctataccctctaggatatgcaaataatcaag

SEQ ID NO: 220 - DNA, 3094 bp, Homo sapiens
  misc feature (2): n equals a,t,g, or c
  misc feature (4): n equals a,t,g, or c
ananctgcagacactcgtcattgatctttccacccgtaagtgcatcgtcttcttctttccagtggtttcagagcacagtgagcaaagaggacgccatgccggaagcactgaaaagtctcatattcccgaattttgaacctttgcacaaatttcatactaattttctcaaggaaattgagcaacgacttgccctgtgggaaggccgctcaaatgcccaaatcagagattaccaaagaatcggcgatgtcatgctgaagaacattcagggcatgaagcacctggcggctcacctgtggaagcacagcgaggccttggaggccctggagaatggaatcaagagctcccggcggctggagaacttctgcagagactttgagctgcagaaggtgtgttacctaccgctcaacaccttcctcctgcggccactgcaccggctcatgcactacaagcaggtcctggagcggctgtgcaaacaccacccgccgagccacgccgacttcagggactgccgagccgctttggcagagatcacggagatggtggcacagctccacggtacgatgatcaagatggagaatttccagaagctgcacgaactcaagaaagatttgattggcattgacaatcttgtggttccgggaagggagttcatccgtctgggcagcctcagcaagctctcggggaaggggctccagcagcgcatgttcttcctgttcaacgacgtcctgctatacacgagccgggggctgacggcctccaatcagtttaaagtccacgggcagctcccgctctatggcatgacgattgaggagagcgaagacgagtggggggtgccccactgcctgaccctccggggccagcggcagtccatcatcgtggccgccagttctcggtccgagatggagaagtgggttgaggacatccagatggccattgacctggcggagaagagcagcagccccgcccctgagttcctggccagcagcccccctgacaacaagtcccctgatgaagccaccgcggctgaccaggagtcagaggatgacctgagcgcctcgccacatcgctggagcgccaggccccgcaccgcggcaacacaatggtgcacgtktgctggcaccgcaacaccarcgtctccatggtggacttcagcatcgcagtggagaatcagttgtctggaaacctgctgaggaaattcaaaaacagcaacgggtggcagaagctgtgggtggtgttcacaaacttctgcctgttcttctacaaatcacaccaggacaatcatccccttgccagcctgcctctgctcggctactcgctcaccatcccctctgagtccgagaacatccagaaagactacgtgttcaagctgcacttcaagtcccacgtctactacttcagggcggaaagcgagtacacgttcgaaaggtggatggaagtgatccgcagtgccaccagctctgcctcgcgaccccacgtgttgagccacaaagagtctcttgtgtattgatggccggacacactcgtttccgcagtggctgctttcctggaagacgtttcctttcttctgtattaatgaagcctggtaaaattaacacctgtctgaaaatcaaaaacatggcttcccagcagctctcctgtctccacagccgcgttttttaaccccgacctctcagcgtctgaatgaacagcgctcccacctccagtcctggcatccgctgggggcgctgttctttagctagtgccagtattaaaacattgtcattacgagagtgccaaatgacatcttccctccaccctgcccctgaaaaacagtacacacacatccgttcaacacaagacagggcaagtgtttttcttcctaaaaaaagttctttcttttattattttcacctattggctgctgcattttacgaagtggacttcccggtgtttgtttgtttgtttgcaatacactcagtgcagccttaagcaaatgagatcattttcagatttcattttttttttcagtctttctacttttgtaataataggaagttagtaggactcacttctctgattaataagcaatttgcagcacacagcgttccactgcggggtttcacgctcacctgaaaacacctgttcccaacctacttcttggtgcaagttgaccaaatcgttttaagtggtaactctttccaaccgtagcagggttgttttctgttaagcaaagccgagatccagtgcaatacctggactgtcaccgtcctgtgagtggtgtacacaatgggaagataataagccgtggtgttttgctgtctgtctgtgtcacaagcatgaaaacccgtgtgtcattgatcagcaccatttgtggtatgttccgtgatgagcgtttagtgagcctgctggctgcagagcactatgaaatcatggtacgtagtccccggcacctgtcgttattcctatatcctcctgcaactgtggtttgaaactgcgcattctctagtagtatatatcgtgcctgtcttcaaaaacatttccctttttatactcattccccccaggcatggggtagtgtcagtcggactgcacagggaacacggtttccagtggctttggcccctactcgggaaacgtctgcctgttctcgatggtgatggggtggctgccattcccttggttttcctaagccctttctaacgagagtctcaaacaagcggaggcgagggccaattcaaccccattctttccagcgccccgcaccatagcacctgcccacctgagaaccaggaacgcaccctctctgtggagctctgactggtgtasctggaaacaaacagcaacttgcaaacggacgaagagcctgccgtgtgttaatcatttgccttacaagatgtaccagacggtttccagtactaacaaagggaataaaaatacctcacgccacaatccagcatattgatgttttaaggcaaaacaaccaactttgtctgtagtcttcattttctgtgtggggggggaggggggaaggggacactccagcaagggtttctaaagccccagtgttcagagtgacacagggagggcctgccccccactgttccctatgctcccc

SEQ ID NO: 221 - DNA, 1756 bp, Homo sapiens
ggcacgaggtaagatggaagatgaggaggtcgctgagagctgggaagaggcggcagacagcggggaaatagacagacggttggaaaaaaaactgaagatcacacaaaaagagagcaggaaatccaaatctcctcccaaagtgcccattgtgattcaggacgatagccttcccgcggggccccctccacagatccgcatcctcaagaggcccaccagcaacggtgtggtcagcagccccaactccaccagcaggcccacccttccagtcaagtccctagcacagcgagaggccgagtacgccgaggcccggaagcggatcctgggcagcgccagccccgaggaggagcaggagaaacccatcctcgacaggccaaccaggatctcccaacccgaagacagcaggcagcccaataatgtgatcagacagcctttgggtcctgatgggtctcaaggcttcaaacagcgcagataaatgcaggcaagaaaagatgccgccgttgctgccgtcaccgcctcctgggtcgtccgccacgggttgcactgccgtggcagacagctggacttgagcagagggaacgacctgacttacttgcactgtgatcccccttgctccgcccactgtgaccttgaaccccatgcactgtgacctccccccttctcccccttcccactgtgattggcacatcgacaagggctgtcccaagtcaatggaaagggaaagggtgggggttaggggaaggttggggggacccagcaaggactcagagagtcagacagtgccacttggccacttggggtaaagccagtgccagcaataacagtttatcatgctcattaatttgggatttcaaaacacaaatgaaaactcacacccacccacccccaagtgcatgtctccatcacttaaaaagtaagttccatttgaaaatatcctttcttttttttttcttcctatttttgtttgtttatacaaatatctgatttgcaagaaaaagtgcatgggaggggttttagtggtttaatgaatttttaattaagaaagggtagtttggtagtctacttaaaaatgtttctgggaaattcactagaaacattaaccaataggattttggtgagcttagcttctgtattcctactgccgcccagaaaaggggcagggctctgcagccgccaggacagacgagcaccccatgcctatacctccctccccgagctaagtcccagggcatctgggccttgcctggagactgggctagctctgtaggctcggagctggggagggtgccaaccccacctctagtattttgggagatagggaaagtgaaccgacttccccttcccatacccctcagggtggttccctaccagccaggcttactacttctagaagaaagcagagtgccagggagtgagattgcatccctgggcttagaagtgacggagagaagacttgtttagtattttgccatcagcacaaggaaaaccaggagagagtctgcctccaggactctgagccttctgcctcgtatgttcagaaggtggataggtcttcccactccagcatggcttgaactcttaggggtctgcagtgctccatctccattggtggccccagctcagtaactatacctggtacatttcctgtgtgcaatcagtaccttgaaggcagaacattctgaataaagttggaaaaaraamaaaaaaaaaaaaaaaaaaaaaaaaaaaaaaaaaaaaaaaaaaaaaaaaaaaaactcga

SEQ ID NO: 222 - DNA, 571 bp, Homo sapiens
  misc feature (478): n equals a,t,g, or c
gtccgctatggcggcggcagccgagggcgtactggcgacccggagtgatgagcccgcccgagacgatgccgccgtggagacagctgaggaagcaaaggagcctgctgaagctgacatcactgagctctgccgggacatgttctccaaaatggccacttacctgactggggaactgacggccaccagtgaagactataagctcctggaaaatatgaataaactcaccagcttgaagtatcttgaaatgaaagatattgctataaacattagtaggaacttaaaggacttaaaccagaaatatgctggactgcagccttatctggatcagatcaatgtcattgaagagcaggtagcagctcttgagcaggcagcttacaagttggatgcatattcaaaaaaactggaagccaagtacaagaagctggagaagcgatgagaaacttatttctatgggacagaagtcttttttttttaatgnggaagaatgcttataaaacctgaatcctgaggytgatgaattgkgaaaatcctcaaaaggaaattatgtggcatcacaggacattttaacggt

SEQ ID NO: 223 - DNA, 1697 bp, Homo sapiens
  misc feature (221): n equals a,t,g, or c
  misc feature (1084): n equals a,t,g, or c
  misc feature (1320): n equals a,t,g, or c
ggcacgagctttatccgtgactccttgatcttcttcctgcgtggagagccttcgcgggtgaggcttaacgcgcaggaggtctcacgagagtggaagcaactctcgcgaattttaaaatttatctttttgcctagcgactgacaacaggctggttgcttggcgtggaatcctaaagtggcctggctttgagactggagtgagaccccagccctaggctgggnttctttccattatagaggagacggattcagaagggctacagaccaaggttgttgaaaaccagacatatgatgagcgtctagagattaacgactccgaagaggttgcaagtatttatactccaaccccaagacaccaaggacttcctcgttctgcccatcttcctaacaaggctatggctgataacagcagtgatgagtgtgaagaggaaaataacaaggagaagaagaagacctcacagttgacacctcaacggggctttagtgaaaatgaggatgacgatgatgatgatgatgattcatctgaaactgattctgattctgatgatgatgatgaagagcatggagcccctctggaagggcctatgaccctgcagactatgagcatttgccagtttctgctgaaattaaggaactcttccagtacatcagtaggtacacacctcagttgattgacctggaccacaaactgaagcctttcattcctgattttatcccagctgtcggggatattgatgcattcttaaaggtcccacgtcctgatggaaagcctgacaaccttggcctattggtattggatgaaccttctacaaagcagtcagaccctacggtgctctcactctggttaacagagaattctaagcagcacaacatcacacaacatatgaaagtaaaaagcctagaagatgcagaaaagaatcccaaagccattgacacgtggattgagagcatctctgaattacaccgttctaagccccctgcgactgtgcactacaccaggcccatgcccgacattgacacgctgatgcaggaatggtccccggagtttgaagagcttttgggcaaggtaagcctgcccacggcanaggattgattgcagcctggcagagtacattgacatgatctgtgccattctagacatccctgtctacaagagtcggatccagtccctccatctgctcttttccctctactcagaattcaagaactcacagcattttaaagctctcgctgaaggcaagaaagcattcactccttcatccaattccacctcccaagctggagacatggagacattaaccttcagctgagacacttcccnaarctgctgtttcaaggctgarctggcccctctgccccagctgagatggacagatcgttgtcagctacttgatgtccttgcccatgccacagcttggctcaggggcagtgcatgtcctgctgccctctctgccagagggcacagaacatgtttgtttaatgaacctgcctgcctcagattgctgtccccggggagttaatgcatctacaccactgtggggatttgagttataagaattggaatttctgagatcccatggaggttagattgggaggaaagcttaaaagatgtcctttttgtgagagggatggaattgttttctttcattcgtaaagttagtgagtaaagattttataaatcaaatgctctaaaaaaaa

SEQ ID NO: 224 - DNA, 2156 bp, Homo sapiens
  misc feature (2155): n equals a,t,g, or c
ggttctagcatttttctttaagaagctatgctttggtgctctcagatacatcagtgtcccctgtgtaacattcatactttgaacaatttatgttgttttctaatacctaattaaaactaaagagtaactagcaattttatcttttattcaataaggaagcactaagtaatatggatgattatgacaaaacctgcttggagtctgcattagttggtgtttgcaatatcgttcagcaagaatggggtggtgcaattccttgccaggttgtcctggtgacagacggctgtcttggcattggtagarggtcactgcgacattccctagccactcaaaatcaacgaagtgagagcaacaggtttccactaccttttcctttcccatctaagttatatatcatgtgcatggcgaatttggaggagctccagagcaccgattccttggaatgccttgaacgtctcatagatttaaacaatggtgaagggcagatttttactattgatggccccctgtgcttgaagaatgtacagtctatgtttggaaaactgatagatttggcatatacgcctttccatgctgttctcaagtgtggccacctaactgctgatgtacaagtcttccccaggccagaaccttttgttgtagatgaagaaattgatcctatccctaaagtcattaacacagatttggaaatagtgggatttattgatatagctgatatttcaagtcccccagttctgtccagacatctggtcttacctatagcacttaacaaagaaggtgatgaggtgggtactggcatcactgatgacaatgaagatgaaaattcagccaatcagattgcaggcaaaatacccaacttttgtgtcctgctccatggtagcctaaaagtggaaggaatggtagcgattgttcaattaggtcctgaatggcatggaatgctctactcccaagctgacagcaagaagaaatcaaacctcatgatgtctctctttgagcctggcccagaacctctcccatggctagggaaaatggcacagttgggtcctatttcagatgctaaagaaaacccttatggcgaggatgacaataagagtccattccccctgcagcccaaaaacaaacgcagttatgcccagaatgtgactgtctggatcaaacccagcggcctgcagacagatgtacagaagattttaagaaatgcaaggaaactacctgaaaaaacacagacattctataaggagctgaaccgtttgcgaaaggccgctctagcctttggtttcctggacctgctgaaaggggtggctgacatgctggaaagggaatgcacactgctgcctgagacagcccaccctgatgctgcattccagctgacccatgctgcccagcagctcaagctggccagtaccggcacctctgagtatgccgcttatgaccagaacatcacacctttgcacacggacttctctgggagcagcactgaaagaatttgaaactgacttttggagctttccttcttttttcatttcaactgaaaatgctttaggtaaaaacctttccagtatgttcacctctagaatagccacccaaagaccttcctgaggctgcctcagaagcaccacttgctgttttgaatgactctactagtatgagaaggatgtgaaggtggttggctggttgggctttaacttcctgggattcataatttttaagcttggaagatagctgctgttcccatgatgggcacatttcctgagaagcttgaatgactgatgagcatagagcacccctgccttcctcaggaaacctgaccggcaggggctctctggcttcctgaaagcttcacctcttccctcgtttatatctcaactgtaagggcattttcaagcttctgttcatggaatgagcaactcagactgtctggagcttgctgagtacaaacacaccaccactaagtttcagaactttccttagaacttgggcaaaatgtggtggtaactcttaagtgcttttggtatctcttgagattctaacttttaaagagcaaccattaatgtgtaaaatgattcctattattcaaggtttttttttaatgaaaataaaatatttgattttctagaaaatggtttcactatgaaaaaaaaaaaaaaaaaaattnc

SEQ ID NO: 225 - DNA, 1791 bp, Homo sapiens
taccggttcggaattcccgggtcgacccacgcgtccgggaactaaagccgggtataagctgttttctctgagttctgtggagcagctggatcaagtccacggaagcaatgaaatcccggacgtctacatcgtggagcgcctcttctccagcagcctggtggtggtagtcagtcacacaaaaccacggcagatgaacgtgtatcacttcaagaaaggcacagagatctgtaattacagctactccagcaacatcttgtccataaggctgaaccggcaaaggctgctggtttgcctagaagagtccatttatattcacaacattaaagacatgaagctgttgaagaccctcctggatattcctgcaaacccaacaggtctatgtgctctctctatcaaccattccaattcttacctggcctatcctggaagcctgacttcaggggagattgtgctttatgatggaaactccctgaaaacagtctgcactattgctgcccatgagggaacactagctgccatcaccttcaatgcctcaggctccaaactagcaagtgcgtctgaaaaaggcacagtcatccgggtgttctctgtccctgatgggcaaaagctctatgagttccggagagggatgaaaaggtatgtgacaatcagctctctagtgttcagtatggattcacaattcctctgcgcctccagtaacaccgagacggtacacatcttcaagctggaacaggtcaccaacagtcgaccagaagagccttcgacctggagtggctacatgggaaagatgtttatggctgctaccaactacctccctacccaggtgtcagacatgatgcatcaggacagggcttttgccactgcacgcttgaacttctccggacagaggaacatctgtaccctctcaacgatccagaagttgccacggctgctagttgcgtcatccagtggacacctttatatgtacaatttggatcctcaggatggaggagagtgtgtcttaatcaaaacccacagcttgcttggctcaggaacaacagaagagaataaagaaaatgacctcagaccttccttacctcagtcttatgcagcgaccgtagccagaccaagtgcatcttcagcctccacggtgccaggttattctgaggacggcggggcgctgcgaggagaagttattcctgaacatgagtttgcgacgggaccagtgtgtcttgatgatgagaatgagtttcctcctataatcttgtgccgtggaaatcagaagggcaaaacgaagcagtcatgatgagaagcacacctcagaaatcaggacatcccccctatcaggtggttttggagaaaacaaggaaggcggaagaatggagtgcaattgtgtgagcagaaaggggggcaggaatcccgggtgctccactgcttaaaccacaggacctggttaactcctcaccaagcttcccacgaccctggttgccaatgggcgcgggagacattgtatacacatcatgctatttaaaatacgttcaaactatagtgtaaatgctaattaaccatattggtatataaccggaattttatattaaaaggggcctcctttttaaatatatgccgtgtaaaaaatgtacttataggaacatctctttgaattgtatttcttgtatattacatacttagagagagactcttttagccaggcaaagtcttttttggctgtggctggaataaatcatttattacttgggagtcccattttggacactaataataaaatcatggcaatgcatttttgaggttttt

SEQ ID NO: 226 - DNA, 1525 bp, Homo sapiens
  misc feature (44): n equals a,t,g, or c
  misc feature (591): n equals a,t,g, or c
  misc feature (601): n equals a,t,g, or c
cctccctcccgggcctgggcgcccagcggacaggtgagcggcancaggtatggcgttgacggtggatgtggccgggccagcgccctggggcttccgtatcacagggggcagggatttccacacgcccatcatggtgactaaggtggccgagcggggcaaagcaaggacgctgacctccggcctggagacataatcgtggccatcaacggggaaagcgcggagggcatgctgcatgccgaggcccagagcaagatccgccagagcccctcgcccctgcggctgcagctggaccggtctcaggctacgtctccagggcagaccaatggggacagctccttggaagtgctggcgactcgcttccagggctccgtgaggacatacactgagagtcagtcctccttaaggtcctcctactccagcccaacctccctcagcccgagggcyggcagccccttctcaccaccaccctctagcagctccctcactggagaggcrgccatcagccgcagcttccagagtctggcatgttccccgggcctccccgctgctgaccgcctgtcctactcaggccgccctggaagccgacaggcnggcctcggcngcgctggcgactcggcggtgctggtgctgccgccttccccgggccctcgttcctccaggcccagcatggactcggaagggggaagcctcctcctggacgaggactcggaagtcttcaagatgctgcaggaaaatcgcgagggacgggcggccccccgacagtccagctcctttcggctcttgcaggaagccctggaggctgaggagagaggtggcacgccagccttcttgcccagctcactgagcccccagtcctccctgcccgcctccagggccctggccacccctcccaagctccacacttgtgagaagtgcagtaccagcatcgcgaaccaggctgtgcgcatccaggagggccggtaccgccaccccggctgctacacctgtgccgactgtgggctgaacctgaagatgcgcgggcacttctgggtgggtgacgagctgtactgtgagaagcatgcccgccagcgctactccgcacctgccaccctcagctctcgggcctgagcccgccatgccctcagcctgcctcactgctgggccagggtcatgcctatataagttggcatggcagggacaatggtgggcagttgctcttacatgagctaagtttggagacctgaggcccctttgtcctcgctgggtgggccaaggtctgggacctgtcttggactgtgggagactcaccctcaccttgccaggcctctcccctgcaggactggcattgcactagtctgaggtggccactgcctttgatcaacctttgtgtgcgagggtctaagtagggtcgaacacagaagtgggaaggagaggggtgggccaggggctaatggtgtcactgtgtaaagtttttgacatactagctctataaatatatgaatatggacaaaataaaaaaaaaaaaaaaaaaaaaaaaaaaaaaaaa

SEQ ID NO: 227 - DNA, 1611 bp, Homo sapiens
  misc feature (840): n equals a,t,g, or c
agggcctaagttaaggagtttaaacaatatttataaataatgagaggcattaaatatattttttaattagaggtgactgttactgcaaaaaaaggatactctacaagaaatataaatttgatagcaagataacaattttgagatgagaatgaatagtgaacttgctgattctgtagcaaaacctgggtgggggttggggtggggggtagtttactttgttgtaaggacttgataacctggctacagcgttttctatgaaatctacttggatcccatgcctgaaatttggaagcatatgtacaaaaatcatttttacgttttatttttaataaatcattgtgtttgaccgtacatgtctaacattttttttctaggatccattccgtaccgttttttaagggatatttgtttaagactttacgtgttaattctttattcttgatgtgtacttagagaaacttaagaggtcctgtggtttttttcccctctcctgttgccctgctagttgcgtgttgaattatatcccttacaggcaaaacttttgaagtggtggatgtggctttttaaactcttaagtttctgtgcatccatctcttgtactaagcgaattgtttatcatcttgacatggttggtcatttctatgacaatttacttcaaactgtgtactgtgtagttctatatagtttgtgttaagcatgtcattcatataaactgtttaaaatttttcagatggcctagtttcatccctcttactggtttgtctgtaatgaatggttaaaaataagggttatattttaccctcaaatgcgtttttgtactttcagagcaggtttaaacgntttttttttttttttcctatatccgaactgttggcctcatggaaatccctttcccgatctttgtagcaccatctactggcagaatggcagagtagctgcgaaacaatttgtttaaaaacttgcttaagacaattgcatcagatttggaagttttgccatcaaaattctttgcagaattggaagttaacacatttgcttgtaactgagatgggcttcacaggaatgtagttgccagttcatatcacaatagccctttctatatgaggtttgaaaatgtaaactgctatgcatagcttggcaatagccctaaattgctatgacaactaatgaaccagctacgtatactggtattttaggtgcaagttgtaaagcaaaatatctgtgtattctgcttggttaacaaatgtatatttgtagccctttcctgcaatagcattcaagttgttgtttataagagaagaacaaaagtgataataggtgaaaattgcctttctggatagaaatagagaatagcaacgtttatggatatcacaaataaagaattcaattctttacatgattgagtgagagtatgtataacctggtgggtgggttcagagtaccttttaatctagtatgcttaacttgatgttaatatttaacttaaatatttgacttacatgttgacgttgaaggctcaaagctatactaagaagctttctgaaagattgggctttaaaataaaataatattttaatattgaaccatttttacttcttgtcactgttcaat

SEQ ID NO: 228 - DNA, 1639 bp, Homo sapiens
  misc feature (1267): n equals a,t,g, or c
tcgacccacgcgtccgcagtagtcggcgtaggccttaggtgggttcgtgcgccttctacctcgctgtttcggttttcctggctcctcggcccttttctcccctgttgcagctgggagcggacgaagcgcgaastgggattttttactgtctcctgaagaatttaacacaaacatggatatcagaccaaatcatacaatttatatcaacaatatgaatgacaaaattaaaaaggaagaattgaagagatccctatatgccctgttttctcagtttggtcatgtggtggacattgtggctttaaagaccatgaagatgagggggcaggcctttgtcatatttaaggaactgggctcatccacaaatgccttgagacagctacaaggatttccattttatggtaaaccaatgcgaatacagtatgcaaaaacagattcggatataatatcaaaaatgcgtggaacttttgctgacaaagaaaagaaaaaagaaaagaaaaaagccaaaactgtggaacagactgcaacaaccacaaacaaaaagcctggccagggaactccaaattcagctaatacccaaggaaattcaacaccaaatcctcaggtccctgattaccctccaaactatattttattccttaataacttaccagaagagactaatgagatgatgttatccatgctgtttaatcagttccctggcttcaaggaagtacgtctggtaccagggaggcatgacattgcttttgttgaatttgaaaatgatgggcaggctggagctgccagggatgctttacagggatttaagatcacaccgtcccatgctatgaagatcacctatgccaagaaataacatttgggatagtcgtctttaaaagacttggtgttatttacagtgtttgttttgataacatttggctgggtcattttaatagttagagatgaggaggagtaaaagtgaaatttttgtgaaggacttaaattatccagtgtttctttagccttggtgaactatgaaatacgaaggccttaattttgtacaataaacttttatttgtattctgtgtawawaatgctttcttgattgacccatckccctatcatcaaatgacttctagtctagaacacacttaaggtttataaacttgtgtaataggatgcttttctagtgttactttggaggagctaattatacaacatcattgaaccattcaataaaagttaagtaaaattagatcacagaagctagtagatgactgttgtratkaanggtaacaatgattgttcctgggtattagaagaaaatgagaccccaggcaggatcctaaatttgatctttgtatccttttaagaaatgaatatattattttgcctgcctagtagggattcccacaagttttcttcattcagtattaaataaaggctgttcttactgtttactgagaaaacagaaagggaatgctatcttcacactttgcatttaatgctgtttccttcatgaggcaggactgttctaaggttaatatgcaatctctttattgaaagacctccagggtaaaaattttttgatctatagtctcttttcccccttaagacaaatagactgattaataaagagttgccagtgctaaaaaaaaaaaaa

SEQ ID NO: 229 - DNA, 1083 bp, Homo sapiens
cagtgagcggagtctgaggtcgctgtggactgcccactggtttgagacggtaacatctgttttgcaggattgtgaaaaatgaggtcctctttctagagtacctgacaggttgcttggcatccagaagatgtttagctaaggccttgcccgagatggacagccggattccttatgatgactacccggtggttttcttgcctgcctatgagaatcctccagcatggattcctcctcatgagagggtacaccacccggactacaacaatgagttgacccagtttctgccccgaaccatcacactgaagaagcctcctggagctcagttgggatttaacatccgaggaggaaaggcctcccagctaggcatcttcatctccaaggtgattcctgactctgatgcacatagagcaggactgcaggaaggggaccaagttctagctgtgaatgatgtggatttccaagatattgagcacagcaaggctgttgagatcctgaagacagctcgtgaaatcagcatgcgtgtgcgcttctttccctacaattatcatcgccaaaaagagaggactgtgcactagaaagttgcagcccacagcccttcatgtggactctgtcatgacatgctaactagacttcaggggagccacttctgttttcagcccctccctggaatagtgagttgggaggatggggagacagctaaccaactgcattacccaaaccatattgcacttttagttccctagttttctaggtgagcttcattccctgaaaggaggatgatgatatctaggcataacctagcctgtgaggaacctagttaggaaagacaactgacatttattgaatatcatgcactagtcccttacatatgtcatattttaattatagaaatcagtagcaaaaagaatcttggggattttccatctgacttccctggccatcttatcccatccttgcactaccagaagattcatacacttttgagactccagtgagacgctgttttcaccccttcctcctcctagcctctctcccaaaaagtaaaacacaatgctgaagaaaaaaaaaaaaaaaaaaaaaaaa

SEQ ID NO: 230 - DNA, 359 bp, Homo sapiens
  misc feature (246): n equals a,t,g, or c
gtgacggagcgcggtgcgcgcggcagggcccggagtatcccgctttctttggaggaaaccaccgcatcagatctgcgctgcggcagaggcaggcaagtccctagcgtggaggggcagcatgctggcagcacttggggaggcggtgcgctaagggattcacgctgtaactgggaccgcagcagggaactacaatttccatagtgctccgcgccctcccagctggctctactgccggcgacgcgttgngtacacytggggatttgttagtcttacatggstttgcgcctcctacctggaagcgggccagcgattggtaccagttcagacatgggtacacgtttgaacagggccgccgcctt

SEQ ID NO: 231 - DNA, 355 bp, Homo sapiens
  misc feature (333): n equals a,t,g, or c
ggcagagggtttctttctcataagaatgaaatcttggaaattgctctggatcaaaaaggacttaccaatgatagaaaaattgctttcattgataaaaatagagatctctgtatcacttctgtgaaaggatttgggaaggaagaacaaattatcaagcttgggaacaatggtgcatactttggcatggaacgatacatgcaatatcctttgtggacttcaagatactcgatttatagtgtggtattaccccaatacagtttatgtggacagagacattttgcctaaaacattatatgaaagggctgcaagtggaatttagtgaaaaatgccccntattgtggagttttgttgggaa

SEQ ID NO: 232 - DNA, 374 bp, Homo sapiens
  misc feature (287): n equals a,t,g, or c
  misc feature (323): n equals a,t,g, or c
  misc feature (332): n equals a,t,g, or c
  misc feature (334): n equals a,t,g, or c
ggcagagggaggcctgggcctctctgcctgctgtagccgtctgccgcgcccttgttcctgcagctgtccagttatcttttgactgccacatatggaccccaaaagatctcaaaaggaaactgtcctcattacaggaggaagtggctattttggttttcgcctgggctgtgcctgaaaccaaaatggagtccatgtgattctgtttgacatcagcagccctgctcaaaccattccagaaggaatcaagtttatacaaggagacatccgccacctgtctgacgtrgagnaaagccttccaggatgcagacgtcamttgtgtgttnccawattgncncttatggtaatgttcagggcgggagcaaactcaatcgaaa

SEQ ID NO: 233 - DNA, 432 bp, Homo sapiens
  misc feature (288): n equals a,t,g, or c
aaaaaccaaaaaaaaaaatttttgaaccaaacaaggggaaaaaaaggagttggggcaaaacaggaggcgtttccctacccgcatacatccccgtccccgagacacccaatccccccacccccagcctgcccgcgcctcccgcccccagctcctcgccctggggacagctggcagccccgcgcggaccagacacaaagccgatcaatcccggaggcgtgggggcggagggacgacccgccggggctttcccgggcgctgctctcctcctgctgccccctcgctaggacncggcggacgcctcgtctggttttcacgccctctagcccctacccccacacccccaaaacagaacagacccccatccctgggctggaggacccgcctcttggcagccagctgagaaggcgccccggggagggggaaacctctgcc

SEQ ID NO: 234 - DNA, 366 bp, Homo sapiens
  misc feature (192): n equals a,t,g, or c
  misc feature (251): n equals a,t,g, or c
  misc feature (320): n equals a,t,g, or c
gggcagtaggagtatgcagccctccccagacacctgamcctgctggtgccttgatcttggacttcccagcctcctgaagcatgaggacagaaatttccgtgctgtatagattacccagcctatgctgttctgttattcttcamaagcagatggagacggacggatcagcamcctccacamggggaactgaangacggggcgaggtcagcccggcaatagcaaaccaggccaggggcgggggtggctgacancaggcaggggggttactaggaacaggtcatgaaaggccctcttacagaggtgggcctgcagcaggcatnagcttaaaggatgggtttggagcttcagtgtgggttggagccagag

SEQ ID NO: 235 - DNA, 428 bp, Homo sapiens
  misc feature (370): n equals a,t,g, or c
  misc feature (383): n equals a,t,g, or c
  misc feature (405): n equals a,t,g, or c
gtcacgagctcgtgcactctacgggagggtagctccagctgcagccagagtgtggccctgaagacatcagagagcagggcactcccacctgagagggagggggaacaaaaggagaagcctagagcaggcagggcttgctttgtttgttggtttggtttttttagttttattttctttttcagagaagacagtttcaagctctcctctaagtaaggtgggagccactggagggcatgaactgaggcgtgagatgttatgatttactaatgaacaagatcactctggccactgagataggagtgggaccacaagaaggaagggttagaaggytgttggattcaccaagccaagrgttgwtggcgtttgaacnggggctttacagnaaaaagggttccaaaaagtttnatttctggatattttgaagttgg

SEQ ID NO: 236 - DNA, 966 bp, Homo sapiens
  misc feature (896): n equals a,t,g, or c
  misc feature (956): n equals a,t,g, or c
cggacgcgtggggatgctccggctgctcagttccctcctccttgtggccgttgcctcaggctatggcccaccttcctctcrcycttccagccgcgttgtcmatggtgaggatgcggtcccctacagctggccctggcaggtttccctgcagtatgagaaaagtggaagcttctaccacacgtgtggcggtagcctcatcgcccccgaytgggttgtgactgccggccactgcatctcgagggatctgacctaccaggtggtgttgggtgagtacaaccttgctgtgaaggagggccccgagcaggtgatccccatcaactctgaggagctgtttgtgcatccactctggaaccgctcgtgtgtggcctgtggcaatgacatcgccctcatcaagctctcacgcagcgcccagctgggagatgccgtccagctcgcctcactccctcccgctggtgacatccttcccaacaagacaccctgctacatcaccggctggggccgtctctataccaatgggccactcccagacaagctgcagcaggcccggctgcccgtggtggactataagcactgctccaggtggaactggtggggttccaccgtgaagaaaaccatggtgtgtgctggagggtacatccgctccggctgcaacggtgactctggaggacccctcaactgccccacagaggatggtggctggcaggtccacggtgtgaccagctttgtttctggctttggctgcaacttcatctggaagccyacrgtgttcactcgagtctccgccttcatcgactggattgaggagaccatagcaagccactagaaccaaggcccagctggcagtgctgatcgatcccacatcctgaataaagaataaagatctctcagaaaattcnaaaaaaaaaaaaaaaaaaaaaaaaaaaaaaaaaaaaaaaaaaaaaaaaaaaaaaaaaaangggggggggg

SEQ ID NO: 237 - DNA, 697 bp, Homo sapiens
  misc feature (473): n equals a,t,g, or c
  misc feature (693): n equals a,t,g, or c
ctatctgtggagctgcccccacaatggctggctctcccacaactgtggccatcatgaagacgctggtgtcatctgctcagcttcccagtcccagccgacacccagcccagacacttggccaacctcwcrtgcatcaacagcaggatctgaatccactttggccctgagactggtgaatggaggtgacaggtgtcgaggccgagtggaggtcctataccaaggctcctggggcaccgtgtgtgatgactactgggacaccaatgatgccaacgtggtctgcaggcagctgggctgtggctgggccatgtcagccccaggaaatgcccagtttggccagggctcaggacccattgtcctggatgatgtgcgctgctcaggacacgagtcttacctgtggagctgcccccacaatggctggctctcccacaactgtggccatcatgaagaygctggtgtcatctgctcagctkcyncagtcccagtcracrcccaggccagatacttggctgaccaccaacttaccggcattgacagtaggatctgaatccagtttggctctgargctggtgaatggaagtgacagtgtcgargccgagtggaggtcctgtatcgaggctcctggggaaccgtgtgtgatgacagctgggacaccaatgatgccaatgtggtctgcaagcagctkgggtgtggctnggcc

SEQ ID NO: 238 - DNA, 2267 bp, Homo sapiens
  misc feature (250): n equals a,t,g, or c
  misc feature (824): n equals a,t,g, or c
  misc feature (2267): n equals a,t,g, or c
ccgtgccctgcccgcccggccacttcccgcccatgagccccgacttcaccgtcttcatgatcaagtacctgatgaccatgatcgtcggcatcaccactggcttctggatctggtcgggcaagaccctgcagtygtggcgccgcttctaccacagacttagccacagcagcwagggggagactgcggtatgagccccggcccctccccacctttcccaccccagccctcttgcaagaggagaggcacggtnagggcaaaagaactgctgggtgggggcctgtttctgtaactttctccccctctactgagaagtgacctggaagtgaagaagttytttgcagatttggggcgaggggtgatttggaaaagaagacctgkgtggaaagcggtttgggatgaaaagatttcaggcaaagacttkcaggaagatgatgataacggcgatgtgaatcgtcaaaggtacgggccagcttgtgcctaatagaaggttgagaccagcagagactgctgtgaagtttctcccggctccgaggctgaacggggactgtgagcgatccccctgctgcagggcgagtggcctgtccagacccctgtgaggccccgggaaaggtacagccctgtctgcggtggctgctttgttggaaagagggagggcctcctgcggtgtgcttgtcaagcagtggtcaaaccataatctcttttcactggggccaaactggagcccagatgggttaatttccagggtcagacattacggtctctcctcccctgccccctcccgcctgtttttcctcccgtactgctttcaggtcttgtaaaataangcatttggaagtcttgggaggcctgcctgctagaatcctaatgtgaggatgcaaaagaaatgatgataacattttgagataaggccaaggagacgtggagtaggtatttttgctactttttcattttctggggaaggcaggaggcagaaagacgggtgttttatttggtctaataccctgaaaagaagtgatgacttgttgcttttcaaaacaggaatgcatttttccccttgtctttgttgtaagagacaaaagaggaaacaaaagtgtctccctgtggaaaggcataactgtgacgaaagcaacttttataggcaaagcagcgcaaatctgaggtttcccgttggttgttaatttggttgagataaacattcctttttaaggaaaagtgaagagcagtgtgctgtgcacacaccgttaagccagaggttctgacttcgctaaaggaaatgtaagaggttttgttgtctgttttaaataaatttaattcggaacacatgatccaacagactatgttaaaatattcagggaaatctctcccttcatttactttttcttgctataagcctatatttaggtttcttttctatttttttctcccatttggatcctttgaggtaaaaaaacataatgtcttcagcctcataataaaggaaagttaattaaaaaaaaaaagcaaagagccattttgtcctgttttcttggttccatcaatctgtttattaaacatcatccatatgctgaccctgtctctgtgtggttgggttgggaggcgatcagcagataccatagtgaacgaagaggaaggtttgaaccatgggccccatctttaaagaaagtcattaaaagaaggtaaacttcaaagtgattctggagttctttgaaatgtgctggaagacttaaatttattaatcttaaatcatgtactttttttctgtaatagaactcggattcttttgcatgatggggtaaagcttagcagagaatcatgggagctaacctttatcccaccttkgacactaccctccaatcttgcaacactatcctgtttctcagaacagtttttaaawggccaaycawagagggtactgtaaagtgtacaagttactttatatatgtaatgttcacttgagtggaactgctttttacattaaagttaaaatcgatcttgtgtttcttcaaccttcaaaactatctcatctgtcagatttttaaaactccaacacaggttttggcatcttttgtgctgtatcttttaagtgcatgtgaaatttgtaaaatagagataagtacagtatgtatattttgtaaatctcccatttttgtaagaaaatatatattgtatttatacatttttactttggatttttgttttgttggctttaaaggtctaccccactttatcacatgtacagatcacaaataaatttttttaaatacaan

SEQ ID NO: 239 - DNA, 767 bp, Homo sapiens
  misc feature (748): n equals a,t,g, or c
gtgcaaaatcagagaggggtgcaagatcctgatttttcaggagttcaagcgacaatggcagcccaatacggcagtatgagcttcaaccccagcacaccaggggccagttatgggcctggaagcaagagcccagaaattcccaattgagaattgtgttagtgggtaaaaccggagcaggaaaaagtgcaacaggaaacagcatccttggccggaaagtgtttcattctggcactgcagcaaaatccattaccaagaagtgtgagaaacgcagcagctcatggaaggaaacagaacttgtcgtagttgacacaccaggcattttcgacacagaggtgcccaatgctgaaacgtccaaggagattattcgctgcattcttctgacytccccagggcytcatgctcstgcttctggtggttccactgggccgttacactgaggaagagcacaaagccacagagaakatcctgaaaatgtttggagagagggctagaagtttcatgattctcatattcacccggaaagatgacttaggtgacaccaatttgcatgactacttaagggaagctccagaagacattcaagacttgatggacattttcggtgaccgctactgtgcgttaaacaacaaggcaacacgcgctgagcaggagcgcccagaggcaccagttgctgggcctgatccagcgcgtggtgagggagaacaaggaaggttgttacattaataggatgtaccaaagggcggggganggcgattccagaaggcaaa

SEQ ID NO: 240 - DNA, 1718 bp, Homo sapiens
  misc feature (71): n equals a,t,g, or c
  misc feature (1505): n equals a,t,g, or c
  misc feature (1632): n equals a,t,g, or c
  misc feature (1656): n equals a,t,g, or c
  misc feature (1715): n equals a,t,g, or c
ctcacctctcaccatctgctctgtggctcccagtgctgactctggaagctttatcttgggtaaaagatgtntgatcagacctttctcgttaatgtatttggctcatgtgacaaatgtttcaaacaacgagctctgagaccagttttcaagaagtctcaacaactcagctactgttcaacatgtgcagaaattatggcaaccgaggggctgcacgagaacgagacgctggstcgctgaagagcgaggccgagagcctcaagggcaagctggaggaggagcgagccaagctgcacgatgtggagctgcaccaggtggcggacgggtggaggccctggggcagtttgtcatgaagaccagaaggaccctcaaaggccacgggaacaaagtcctgtgcatggactggtgcaaagataagaggaggatcgtgagctcgtcacaggatgggaaggtgatcgtgtgggattccttcaccacaaacaaggagcacgcggtcaccatgccctgcacgtgggtgatggcatgtgcttatgccccatcgggatgtgccattgcttgtggtggtttggataataagtgttctgtgtaccccttgacgtttgacaaaaatgaaaacatggctgccaaaaagaagtctgttgctatgcacaccaactacctgtcggcctgcagcttcaccaactctgacatgcagatcctgacagcgagcggcgatggcacatgtgccctgtgggacgtggagagcgggcagctgctgcagagcttccacggacatggggctgacgtcctctgcttggacctggccccctcagaaactggaaacaccttcgtgtctgggggatgtgacaagaaagccatggtgtgggacatgcgctccggccagtgcgtgcaggcctttgaaacacatgaatctgacatcaacagtgtccggtactaccccagtggagatgcctttgcttcagggtcagatgacgctacgtgtcgcctctatgacctgcgggcagatagggaggttgccatctattccaaagaaagcatcatatttggagcatccagcgtggacttctccctcagtggtcgcctgctgtttgctggatacaatgattacactatcaacgtctgggatgttctcaaagggtcccgggtctccatcctgtttggacatgaaaaccgcgttagcactctacgagtttcccccgatgggactgctttctgctctggatcatgggatcataccctcagagtctgggcctaatcatcttctgacagtgcactcatgtatacctgagaatttgaaatcttcacatgtaaatagatattacttctagaggagcttagagtttattgcagtgtagcttaggggagcaacccatggctcacaggtcactaagcgtctccaatatgactattaaaactgtcacctctggaaatacactagtgtgagccttcagcactgcgagaataccttcaagtacagtatttttcttttggaacactttttaaaatgnatctgtttttaaggttattctaaattatagtaagcctcaactcattctgtcaccagtagaattcagcaagttaatatattccatattatttctttgaatcaattcattttcagaagcactttaaagnctgatatttctcgatgtgcactgngatgcctggaacctttctttgggaaggctgatttatggactgaggatggtgatggctgngat

SEQ ID NO: 241 - DNA, 3599 bp, Homo sapiens
ctcacaggccccacctccgccgccacctcccagcaggcccgggccgcctcctctgcctccaagttccagcggcaatgacgaaaccccaagactcccacagcggaatctgtccctcagttcgtccacgcccccgttaccttcgccaggacgttcaggtcctcttcctcccccgcccagtgagagacccccacctccagtgagggacccgccaggccgatcaggccccctcccaccacctcctccagtaagcagaaacggcagcacatctcgggccctgcctgctacccctcagttgccatccaggagtggagtagacagtcccaggagtggacccaggcctccccttcctcctgataggcccagtgctggggcacctcccccacctccaccatcaacatctattagaaatggcttccaagactctccatgtgaagatgagtgggaaagcagattctacttccatccgatttccgatttgccacctccagagccatatgtacaaacgaccaaaagttatcccagcaaactggcaagaaacgaaagccggagtggatccaaccgaagagaaaggggtgctccaccactccctcccatcccgaggtgatctttgcctgctcttctctacccaagctcaagagctgcttctgttgctatctaagaactgcataccctcctccctgcttcttcccttgtgcctcatgtatgggcaggaggaaaggtgggaggggagtgggaatatgcgtgtgtgggtgggaatcggtaagaaatgcacctagcttttcatattgtgtttattctccaggctattgcttgcttcagctgcagcctgcctgtgctggctgctggggtcgataggcttttgtcgtaataggcagagatgacttgcatcccagctttccaccaaccaaattcaaacattcactgcttatttgttacagactgtaattattaaagtccctgagagctgttttctcccgttcctttttcgcatgcttggcctcctctctgtttctatgaaccacagaccacctaagcaagctgctgagtaagggctcactggaaacttgcagtcacaggatgtccaatctttggcagtccgagcttggctctaggacagagctgtccaatagaaatataatgtgagccccatatacaatttttacatttctaatatattttaaacaagtgaagttaatatgcatccaaaatatttcaacctgtaatcaacataaaattttaatgagatattttatattattttttggtactgaatcttcaaaatccagagtgtattttacacttaccgcacatctccattcagactagtcacatttttaagtgctcagtagccacatgtggctggtggctactggattagacagcacgagtctggaagatggaagctagtgcagaaacctcttgtttaaaaaacaaaaaaggcaagatgggcttgagcgattcaagaggcaactaaaaataaaattaggacccagcaccttgtttgacacacagtttgaccttcgattttcctcccttaacttccctcttcccttaatatctgtatacaagtgttgcttcaaagtaccaaggtcagaaattgattcagtacggtttactaaagtcatgtggaataaagccattggaaacaaatggaaagcctgtcgggacttctgggctcagaaccagctggctcacgcactccacttgtcagctggacttctgccttgtgaaatggaagcagcctttgttcctttctggctgagcaagctcctgaggctgggagagactaggaaggcttggtaggaggggaaaaaagtcaggaaaagatatcaaatcagaaacatggaagaagaagggaaccgatttgagttggtgggcaaaactctaaaaatctaaatctgatgcttatgtaagggttgagcgaattagggagattgctagtggaaattggagggaatttgttttgcatcatttgtctaggatctatgcaaatatagctccactaaaggaccatagggaagagccagccttgccttttcttatatgattttgtttacaaaattttactgggacttttaaatctagctatagagttgggaaaaaatatttccacttagatattttacatggttttgtttaaaattaccattacttgttttttaaaaacacatgaccacatatgtatatgtatatctacctaaacattgtatcatggtttcagtatgttattcatgtattactgggagatgctaccaagaaaccaacccaaagaaaattctgaaaaatacatttctatttatagaataaatgtttcatttatataaaagcaaaagaacttagagttctaataaatgggatgtctaataaattatgaagttactgatttgaatatattatatttttataacttccttgccaaagtcctgatttagtacattagagaacctgtgtttcctctctcctctaccattcatctctcttccatacagtcatttgggctttttactcaaagagaatcaagaaataataagrtataacaagcttggcaaagtgttggctttttaaaaaaaaatttttttaatctctagcagtttggtaatttagcagcatcatttatttgggattcttttatctgatttcaacagtgaaaaacatccctatgataaagcctaatgacccatttcacaaaagatggaatttgcccttcctagaaaatatgacggagaaaagtctgactcagagaaagtgagtctgaattttataaggggtagtaagaattggacaattcctttgcatatctgaacttggcaggtaccgttctaaatctgaaacagggtgatagctcaaagttgccattcatccagaatagattgttttagaatgtagtgtttaagtgactgtttcattaatacacctacaccctttctttgaaagtttgcaacctaattgcatctaaaactatgaataagttctgtggtaaaatcttaaactatggaaaattacaaaaatgaatttttcttccctgaaatcagagcttacatgtgtgtttttttataacattttcagataaatgtattcaacatgtaatacagtattttaacattcacctcttattttatattgaaatgtattacagtattaaaactcagtgttcagtatttatttcactatgcattttatttagtaaaagccaggagaaatgtttaatccaatggtgccttactttgtgatttaaaagaaatcaacttttttttatgtctaagtagtagattatttgcatatttgtaaaaactgttaggtctttatattttaaagtgtaataccagttttgttattttagtagcagaaatgggatgattgttaaagttccccaaaaatgttggcatgaaattaatttttccctccttatagtcaaggaccgtagaggaagaaaaacttttttttcatatcatgcactatgtaaacagacacattttgctatctgtgtcatcaggatagtgtaagtggtagggtagagactaccctagacatctgcatctttgtaagttagccagacaataaagaaaagcagaatgaaaaaaaaaaaaaaaaaaaaaaaa

SEQ ID NO: 242 - DNA, 2887 bp, Homo sapiens
  misc feature (2819): n equals a,t,g, or c
  misc feature (2850): n equals a,t,g, or c
  misc feature (2883): n equals a,t,g, or c
  misc feature (2885): n equals a,t,g, or c
gcgagagcggaggccgcactccagcactgcgcagggaccgccttggaccgcagttgccggccaggaatcccagtgtcacggtggacacgcctccctcgcgcccttgccgcccacctgctcacccagctcaggggctttggaattctgtggccacactgcgaggagatcggttctgggtcggaggctacaggaagactcccactccctgaaatctggagtgaagaacgccgccatccagccaccattccaaggaggtgcaggagaacagctctgtgataccatttaacttgttgacattacttttatttgaaggaacgtatattagagcttactttgcaaagaaggaagatggttgtttccgaagtggacatcgcaaaagctgatccagctgctgcatcccaccctctattactgaatggagatgctactgtggsccagaaaaatccaggctcggtggctgagaacaacctgtgcagccagtatgaggagaaggtgcgcccctgcatcgacctcattgactccctgcgggctctaggtgtggagcaggacctggccctgccagccatcgccgtcatcggggaccagagctcgggcaagagctccgtgttggaggcactgtcaggagttgcccttcccagaggcagcgggatcgtgaccagatgcccgctggtgctgaaactgaagaaacttgtgaacgaagataagtggagaggcaaggtcagttaccaggactacgagattgagatttcggatgcttcagaggtagaaaaggaaattaataaagcccagaatgccatcgccggggaaggaatgggaatcagtcatgagctaatcaccctggagatcagctcccgagatgtcccggatctgactctaatagaccttcctggcataaccagagtggctgtgggcaatcagcctgctgacattgggtataagatcaagacactcatcaagaagtacatccagaggcaggagacaatcagcctggtggtggtccccagtaatgtggacatygccaccacagaggctctcagcatggcccaggaggtggaccccgagggagacaggaccatcggaatcttgacgaagcctgatctggtggacaaaggaactgaagacaaggttgtggacgtggtgcggaacctcgtgttccacctgaagaagggttacatgattgtcaagtgccggggccagcaggagatccaggaccagctgagcctgtccgaagccctgcagagagagaagatcttctttgagaaccacccatatttcagggatctgctggaggaaggaaaggccacggttccctgcctggcagaaaaacttaccagcgagctcatcacacatatctgtaaatctctgcccctgttagaaaatcaaatcaaggagactcaccagagaataacagaggagctacaaaagtatggtgtcgacataccggaagacgaaaatgaaaaaatgttcttcctgatagataaarttaatgcctttaatcaggacatcactgctctcatgcaaggagaggaaactgtaggggaggaagacattcggctgtttaccagactccgacacgagttccacaaatggagtacaataattgaaaacaattttcaagaaggccataaaattttgagtagaaaaatccagaaatttgaaaatcagtatcgtggtagagagctgccaggctttgtgaattacaggacatttgagacaatcgtgaaacagcaaatcaaggcactggaagagccggctgtggatatgctacacaccgtgacggatatggtccggcttgctttcacagatgtttcgataaaaaattttgaagagttttttaacctccacagaaccgccaagtccaaaattgaagacattagagcagaacaagagagagaaggtgagaagctgatccgcctccacttccagatggaacagattgtctactgccaggaccaggtatacaggggtgcattgcagaaggtcagagagaaggagctggaagaagaaaagaagaagaaatcctgggattttggggctttccartccagctcggcaacagactcttccatggaggagatctttcagcacctgatggcctatcaccaggaggccagcaagcgcatctccagccacatccctttgatcatccagttcttcatgctccagacgtacggccagcagcttcagaaggccatgctgcagctcctgcaggacaaggacacctacagctggctcctgaaggagcggagcgacccagcgacaagcggaagttcctgaaggagcggcttgcacggctgacgcaggctcggcgccggcttgcccagttccccggttaaccacactctgtccagccccgtagacgtgcacgcacactgtctgcccccgttcccgggtagccactggactgacgacttgagtgctcagtagtcagactggatagtccgtctctgcttatccgttagccgtggtgatttagcaggaagctgtgagagcagtttggtttctagcatgaagacagagccccaccctcagatgcacatgagctggcgggattgaaggatgctgtcttcgtactgggaaagggattttcagccctcagaatcgctccaccttgcagctctccccttctctgtattcctagaaactgacacatgctgaacatcacagcttatttcctcatttttataatgtcccttcacaaacccagtgttttaggagcatgagtgccgtgtgtgtgcgtcctgtcggagccctgtctcctctctctgtaataaactcatttctagcaraaaaaaaaaaaaaaaaaaaaaaaaaaaaanaaaaaaaaaaaaaaaaggggggccgcccaanaggatcccccggggggcccaagcttacgcgtgncngc

SEQ ID NO: 243 - DNA, 1253 bp, Homo sapiens
  misc feature (109): n equals a,t,g, or c
  misc feature (415): n equals a,t,g, or c
  misc feature (1059): n equals a,t,g, or c
cggaacattactcgtatccctgcacacccacgaccatgstgccgcgcagtgcctactggcaccacatcactggttcccagaacatcgccgaagcctccagctatgctgntgaggggtatggggcagcccaggccagctcggaaacagacctcctcaacagattcatcctgctaaagccaaagcccagccagggggacagcagtgaggccaagaccccatcccagtgaccacagtgctggcgagcaccgatgactgctgggggctgcctgctgcggggctggctgcagtgtaccgtggacagcctcagggggctgtcggccaagagcctggagaaagggagcaagctgccccctccttgcccccaaggwtgaggstggactgaggcaaagggctggccacaccacctgagcatgtntkaaggggttggagctaccgtgggactatatactgttaatgattttaatatatatggcttatgacatactctgtatcaatgagatcccctcaccctcaccccatccttccccaccaatacacacaaattttttaatcccatgaccaggccacggtcaaggctgtttttgagtatgagtgcagtcgtgtccatcctccatggcacagccctcctgctgccaggacctgcttgaactaccagggccacaggagggggataatcagagcttgaggctggcactctgactgctggcttttcccaaacagcccaagggccggaacagcaggtggcttctcagttcctctgggcctggagtgacacaggaaggatctgcacttcctctgtgctgcttgccagccttgcagttggagttttaagcagaggtgacatctggttgacgcctcaggtgaaaatctggttttaaaatgtaacttctgcacaggctccttcctgctttgtaggctgggaagatgcccctggggtaggggtgctgattacctcagccatgtggaggaaggctggagcttgttcctgccccagkaataggccaggagggaaggccgcagcaggactgccgtggggagcacccctgctgcccccctctnactgaccaggggtggacaatgcccaagcagagggagcccccttgccctgtttggccaccctytggccagccaaaagcactctgaaaaccaasaccttcccatttcctcctccccacatggtgctgaggctccctgstgcaatgcaattaaagcaattgattttctagtgctggtatttgttgactaccatgcag

SEQ ID NO: 244 - DNA, 1602 bp, Homo sapiens
  misc feature (7): n equals a,t,g, or c
  misc feature (1579): n equals a,t,g, or c
cttgggngaaagagaattcatttttaaaaaaaaaaaaaaagtgaaggaaggagacagcagattggaaataacactggagtggatgggatgtcytyttccctragggggccggggtaccagacgggaggctgggagaggatgagaggctgccccatggctggaggcagcgtccgtgtgtgcagtcaccatcatcaacccccattcggccccttccccagatgcgctggtgacaggggcttcttggatgtcaaatcatgttgtaggagggtgcagactgcgggcttctgtggggagcagtactactgtgtctgtcggcagtggccatgggaccctcagcccgtcctgtacatggagcagggtgcacagtcaccctccatcctgtggcgagaggctggcccggcccggccaggcgaggcagaaggtgtcggccaagtggccccgaccccatcccgcaatctctcagctgctttttattacctttgtgccccatttgggagtttgcttcctccacctggacactttgcccgggaggtcatcagagcccaaccccaggctctgctcggttggagaggggatgacttcaccaccacctgaccttcctagggtcctggtctcactgtcagctgggggtccgttgtgtgtatttgtacagttttgctgtatggggtttgtcacccaaaagctgatgctgagaaaggcctccctggggcccctcccgcgggcatctgagagacctggtgttccagtgtttctggaaatgggtcccagtgccgccggctgtgaagctctcagatcaatcacgggaagggcctggcggtggtggccacctggaaccaccctgtcctgtctgtttacatttcactatcaggttttctctgggcattacgatttgttcccctacaacagtgacctgtgcattctgctgtggcctgctgtgtctgcaggtggctctcagcgaggtacggggagggcgtcaccctgcagaacggcagagtgacgcgtcctctcgctgctgagcaccagctgtttacctgccctgcatcacttcctcggatactttactcaataagcatttcccctggagtgtccgtgccctggtgttttttatcgatacgttgattaaaacgcgtggttccccgtgtgcctgaagcagacattgctgtgaaatcttttatttttgttttatgacacagcatcaatttcatgaatactttgaaagggccattagaaaaaataagagccaatttgggtcatttgagaaacattttcagcacaattacagtgggggcacgggccgttcggctccagctgggttttcccagatgcaacaatcgcggttctggcttctccactggtggggatggggatcgcgccttcggagctctcagggcgcctgtctgtcgggggctgggtgcgtccacagccccgggggatggcgcgtggcgtagcccaggaacggcatgtgggtgggtctctgacctgcttgtgcagggacttgagggacctcatcccgatggccgaggcaggggctccccacgggataaaaggatccggcctggccttggggtccaagaggagngccaagggagtggacctggcccc

SEQ ID NO: 245 - DNA, 1284 bp, Homo sapiens
  misc feature (21): n equals a,t,g, or c
  misc feature (63): n equals a,t,g, or c
  misc feature (73): n equals a,t,g, or c
  misc feature (170): n equals a,t,g, or c
  misc feature (1229): n equals a,t,g, or c
  misc feature (1272): n equals a,t,g, or c
cggaaggattggggttcaccngcccttcaagtggtcttccttcacccccccaaggcccagtgncagttggaanttggttcgaagatcgcttatggcaccagttcaagggggcgtccgggtcatcgtgcagcctcccgaagactgtggctcggggcttcagctcttccagnctttcactgtgcaccgcagccctgtcaccaagatcatgctgtcggagaagcacctcatctcagtctgtgccgacaacaaccacgtgcggacatggtctgtgactcgcttccgcggcatgatttccacccagcccggctccaccccactcgcttcctttaagatcctggctctggagtcggcagatgggcatggcggctgcagtgctggcaatgacattggcccctacggtgagcgggacgaccagcaagtgttcatccagaaggtggtgcccagtgccagccagctcttcgtgcgtctctcatctactgggcagcgggtgtgctccgtgcgctccgtggacggctcacccacgacrgccttcacagtgctggagtgcgagggctcccggcggctcggctctcggccccggcgctacctgctcactggccaggccaacggcagcttggccatgtgggacctaaccaccgccatggacggcctcggccaggcccctgcaggtggcctgacggagcaagagctgatggaacagctggaacactgtgagctggccccgccggctccttcagctccctcatggggctgtctccccagcccctcaccccgcatctccctcaccagcctccactcagcctccagcaacacctccttgtctggccaccgtgggagcccaagccccccgcaggctgaggcccggcgccgtggtgggggcagctttgtggaacgctgccaggaactggtgcggagtgggccagacctccgacggccacccacaccagccccgtggccctccagcggtctcggcactcccctcacacctcccaagatgaagctcaatgaaacttccttttgaacaacgcagctgccatgatgccttgggatgccctggtcctgggggactcaggtgcctccctgattcctgtgggaaccccgggttcagggccagggcctccttggaataaatggttattgttactaggtccccaccttccctcttttctggaagccaaagtcascctccccaataaagtcctcactgccaaaaaaaaaaaaaaaaaaanaaaaaaaaaaaaaaaaaaaaaaaaaaaaaaaaaaaaaaaaaanaaaaaaaaaaaa

SEQ ID NO: 246 - DNA, 2094 bp, Homo sapiens
  misc feature (2086): n equals a,t,g, or c
ttttctctggagaacccaagggcttggggtgggaagcagtctctccttgggattctgcggccgatgtgggatagaagaggtagcatcctggaagccagcctctctggggaacatgagcccccttcctcggggggctgccttgcgtcttagaggagggagagcagagagcacgcatccttggctcctggctctctgagcttcctgatacaggatctgagcatgtccctgggattctgagctgccaacagggccctgggtagtcacatcttgtactcccctttgctgtcccggaggtagtggcaggagttgggccagcccccactaagtggcaggggaagactcacgattgggaagctacctctttgggaatcttggatgtggtgatctcaagttcccacaggccacctccttctggccactcactgctgggacccaggcacctcccttctccatcctctctggattgtcagtaatgtcctggaacagaagcctgtrggatggccttggcacggagaagccctggggtcagtgtcgtgcacggatggcggcagtgttgaacccaggaggctgaacccggcccaccacggaagatgagtgcatggcaaccgcctgccttcacgtcgctccacttggtaaccccaaggtctgggctgttctaggtattgcttcacgtgccccagcaagcccttaacaagagggcctggttccctgaagaaccaatcccaggaaggggccttgatccctccgccttgctgagagtgaaccctcgtctctcctcaccctccatttcatttctgggaattggggcttagtttcgaacctttggcaaggctgttcttactaatgcccaagcccctttacccctctccctataggttacacaggggagaccagggcctcggcagaagactgctgccacacttccgaatcattctgcttgccaaataggtcatcttcaccagttgactgacccaagtttaggaccattggtatcgtgtgtttaaaaaacacatataaaaaaactcttgtgaatattcttgttatgctagagaggaaggtacttctccctctacggctctgcgctggggcctatggtagtaaagttgtttactgtcctttttctgcttcccctggaaatgacaggcattactctcccattggcctcccttccctttatagaaagaccaagcaggccccactggccaagaggtacggtatttggcagtctgagttctcagtaatttggaaagttaaggagttggttcctgtgtcacctttcagttagtgtgggaaaggaagacttctgttttcctgagatcagtgcagtctcaggcctttggcagggctcatggatcagagctgagactggagggagaggcatttcgggtagcctaggagggcgactggcggcacagaaccgaggaaggcaaggttgtttcccccacgctgtgtcctgtgttcaggtgcgacacacaatcctcatgggaacaggatcacccatgcgctgcccttgatgatcaaggttggggcttaagtggataagggaggcaagttctgggttccttgccttttcagagcatgaggtcaggctctgtatccctccttttcctagctgatattctaactagaagcatttgtcaattcctttgcctcccaactgacaacacacgttcattttccaaccttcctaacatcttaaacctttcttctgggagaactagaagacagaatttgctttgattctctcaggcgctgtgcacaagccaggtcttctgttttctctttcttactctacccacattcttgccttctctatccaactgtgaaagtgaggggaggctcctgtccccctctcttaaggtccccaaacctgggagtgcataggtactaaatcaagcagtgcaacttgtaattaagcagctgcagtgtttacatgtttcttaatgtgtcatcttttcaatggctgtattaaaagaagaacgtttgttttaatggtctttctgattaaagaaagcccctgtggctttggaggcattgtgcccacggtccaccaaaaaaaaaaaaaaaaaaaaaaaaaaaaaaaaanaaaaaaaa

SEQ ID NO: 247 - DNA, 1019 bp, Homo sapiens
  misc feature (6): n equals a,t,g, or c
  misc feature (111): n equals a,t,g, or c
  misc feature (879): n equals a,t,g, or c
  misc feature (1010): n equals a,t,g, or c
ggaagncctccttcctgaaggccctgctggccaccttcggctccagcttcctcatcagtgcctgcttcaagcttatccaggacctgctctccttcatcaatccacagctgntcagcatcctgatcaggtttatctccaaccccatggccccctcctggtggggcttcctggtggctgggctgatgttcctgtgctccatgatgcagtcgctgatcttacaacactattaccactacatctttgtgactggggtgaagtttcgtactgggatcatgggtgtcatctacaggaaggctctggttatcaccaactcagtcaaacgtgcgtccactgtgggggaaattgtcaacctcatgtcagtggatgcccagcgcttcatggaccttgcccccttcctcaatctgctgtggtcagcacccctgcagatcatcctggcgatctacttcctctggcagaacctaggtccctctgtcctggctggagtcgctttcatggtcttgctgattccactcaacggarctgtggccgtgaagatgcgcgccttccaggtaaagcaaatgaaattgaaggactcgcgcatcaagctgatgagtgagatcctgaacggcatcaaggtgctgaagctgtacgcctgggagcccagcttcctgaagcaggtggagggcatcaggcagggtgagctccagctgctgcgcacggcggcctacctccacaccacaaccaccttcacctggatgtgcagccccttcctggtgaccctgatcaccctctgggtgtacgtgtacgtggacccaaacaatgtgctggacgccgagaaggcctttgtgtctgtgtccttggttaatatcttaagacttcccctcaacatgctgccccagntaatcagcaacctgactcaagccagtgtgtctctgaaacggatccagcaattcctgagccaagaggaacttgacccccagagtgtggaaagaaagacatcttcccaggctatgcataccatacacagtggnacctttacc

SEQ ID NO: 248 - DNA, 1500 bp, Homo sapiens
  misc feature (999): n equals a,t,g, or c
  misc feature (1065): n equals a,t,g, or c
  misc feature (1280): n equals a,t,g, or c
  misc feature (1343): n equals a,t,g, or c
  misc feature (1400): n equals a,t,g, or c
  misc feature (1463): n equals a,t,g, or c
  misc feature (1496): n equals a,t,g, or c
tcggacatcctggccgcctacaggctgcagcgggagcgcgacttcgaagacccctactccggggggtcgtccggctccgccgccctcgccacccctgtcgcccccggacccacgccgcccccgcgccacggctctcccccacaccgccttattcgggtcgagaccccggggcccccggcgccgcctgctgatgagcggatctccggaccccccgccagcagcgataggctagctatcctagaagactatgcggacccgtttgatgttcaggagactggcgaaggctcagcaggagcttcaggagccccagagaaggtccctgaaaatgatggctacatggagccctatgaggctcaaaagatgatggccgagatccggggctccaaggagacagcaactcagcccttgcctctgtatgacacaccctatgagccagaggaggatggggccaccccggaaggtgagggggccccctggccccgggagtcccgcctgccagaggatgatgagaggccccctgaggagtatgamcagccctgggagtggaagaasgagcsgatttccaaagcctttgcagctggtatcacggggccatcagccgaaccgacgccgagaacctgstccggctgtgcaaagaggccagytacytggtgcgcaacagtgagaccagcaagaatgacttctccctctccctcaagagcagccagggattcatgcacatgaagctgtcccgaaccaaggaacacaaatatgtgctgggccagaacagcccgcccttcagcagcgtccctgaaattgtgcaccactatgccagccgcaagctacccattaagggagccgaacacatgtccctgctctaccctgtggccatccggactctttagatgtgaagccagggcactgtgatagacctgtacccagccctgtgcccatcacctggctgagggctgtggctcttgccagggaacgtgaatctttcaaacctttcttctcctgggnatccagtagaagctggagattccttaatttattctaaagggaaagggctcctggggccttggagtnaaggggttgtctggagctggggaaagaggaatccctggagagaaaggatagcccctggaggaagggggttccagagctactgggatggtagggagtttcagactggcagctccggctcctttccgaccttagggcagaggtggtgacctccaccaccaccaccctctccccactgggtccgtgcgaggtagtgcagaattcggccccttgggcgnccttaccacctctctgcctccgtccccgayttccaccccagaccgtcggagggytccgccagnagtctggttaagaggttttgggggaagacaaggcccttgggaagcagccggtttttnggggggttggggagaggaaggggaggggttcgggcaaaggggactttgcaatccccaagccgncccgtttcgggccaaaggaattaattaaaccgntctt

SEQ ID NO: 249 - DNA, 2301 bp, Homo sapiens
  misc feature (2297): n equals a,t,g, or c
  misc feature (2298): n equals a,t,g, or c
tcgacccacgcgtccgggcagtctccagctaggcccttccgcccccgccctgggcgccgccgtgctcatgctgccgtgacaacaggccaccacatacctcaacctggggaactgtatttttaaatgaagagctatttatatatattatttttttttaagaaaggaggaaaagaaaccaaaagttttttttaagaaaaaaaatccttcaagggagctgcttggaagtggcctccccaggtgcctttggagagaactgttgcgtgcttgagtctgtgagccagtgtctgcctataggagggggagctgttagggggtagacctagccaaggagaagtgggagacgtttggctagcaccccaggaagatgtgagagggagcaagcaaggttagcaactgtgaacagagaggtcgggatttgccctgggggaggaagagaggccaagttcagagctctctgtctcccccagccagacacctgcatccctggctcctctattactcaggggcattcatgcctggacttaaacaatactatgttatcttttcttttatttttctaatgaggtcctgggcagagagtgaaaaggcctctcctgattcctactgtcctaagctgcttttcttgaaatcatgacttgtttctaattctaccctcaggggcctgtagatgttgctttccagccaggaatctaaagctttgggttttctgagggggggaggagggaactggaggttattggggttaggatggaagggaactctgcacaaaacctttgctttgctagtgctgctttgtgtgtatgtgtggcaaataatttgggggtgatttgcaatgaaattttgggacccaaagagtatccactggggatgttttttggccaaaactcttccttttggaaccacatgaaagtcttgatgctgctgccatgatccctttgagaggtggctcaaaagctacagggaactccaggtcctttattactgccttcttttcaaaagcacaactctcctctaaccctcccctcccccttcccttctggtcgggtcatagagctaccgtattttctaggacaagagttctcagtcactgtgcaatatgccccctgggtcccaggagggtctggaggaaaactggctatcagaacctcctgatgccctggtgggcttagggaaccatctctcctgctctccttgggatgatggctggctagtcagccttgcatgtattccttggctgaatgggagagtgccccatgttctgcaagactacttggtattcttgtagggccgacactaaataaaagccaaaccttgggcactgttttttctccctggtgctcagagcacctgtgggaaaggttgctgtctgtctcagtacaatccaaatttgtcgtarcttgtgcaatatatactgttgtgggttggagaaaagtggaaagctacactgggaagaaactcccttccttcaatttctcagtgacattgatgaggggtcctcaaaagacctcgagtttcccaaaccgaatcaccttaagaaggacagggctagggcatttggccaggatggcaccctcctgctgttgccccttagtgaggaatcttcaccccacttcctctacccccaggttctcctccccacagccagtcccctttcctggatttctaaactgctcaattttgactcaaaggtgctatttaccaaacactctccctacccattcctgccagctctgcctccttttcaactctccacattttgtattgccttcccagacctgcttccagtctttattgctttaaagttcactttgggcccacagacccaagagctaattttctggtttgtgggttgaaacaaagctgtgaatcactgcaggctgtgttcttgcatcttgtctgcaaacaggtccctgcctttttagaagcagcctcatggtctcatgcttaatcttgtctctcttctcttctttatgatgttcactttaaaaacaacaaaacccctgagctggactgttgagcaggcctgtctctcctattaagtaaaaataaatagtagtagtatgtttgtaagctattctgacagaaaagacaaaggttactaattgtatgatagtgtttttatatggaagaatgtacagcttatggacaaatgtacacctttttgttactttaataaaaatgtagtaggataaaaaaaaaaaaaaaaaaaaaaaaaaaaaaaaaaaaaaaaaaaaaaaaaaaaaaaaaaaaaaaaaaaaaaaaaaaaaaaaaaaaaaaaaaaaaaaaaagggggggcnnccc

SEQ ID NO: 250 - DNA, 2117 bp, Homo sapiens
  misc feature (61): n equals a,t,g, or c
  misc feature (63): n equals a,t,g, or c
  misc feature (793): n equals a,t,g, or c
acccacgcgtccggcgagggctggaagtctggagcaggtgcgcggctgcaacggcacaggnrnawgctcgggccggcagggtttccccgcacgctggcgcccasmtcccggcgcggaggccrtgtaagtttcgctttccattcagtggaaaacgaaagctgggcggggtgccacgagcgcggggccagaccaaggcgggcccggagcggaacttcggtcccagctcggtccccggctcagtcccgacgtggaactcagcagcggaggctggacgcttgcatggcgcttgagagattccatcgtgcctggctcacataagcgcttcctggaagtgaagtcgtgctgtcctgaacgcgggccaggcagctgcggcctgggggttttggagtgatcacgaatgagcaaggcgtttgggctcctgaggcaaatctgtcagtccatcctggctgagtcctcgcagtccccggcagatcttgaagaaaagaaggaagaagacagcaacatgaagagagagcagcccagagagcgtcccagggcctgggactaccctcatggcctggttggtttacacaacattggacagacctgctgccttaactccttgattcaggtgttcgtaatgaatgtggacttcaccaggatattgaagaggatcacggtgcccaggggagctgacgagcagaggagaagcgtccctttccagatgcttctgctgctggagaagatgcaggacagccggcagaaagcagtgcggcccctggagctggcctactgcctgcagaagtgcaacgtngcccttgtttgtccaacatgatgctgcccaactgtacctcaaactctggaacctgattaaggaccagatcactgatgtgcacttggtggagagactgcaggccctgtataygatccgggtgaaggactccttgatttgcgttgactgtgccatggagagtagcagaaacagcagcatgctcaccctcccactttctctttttgatgtggactcaaagcccctgaagacactggaggacgccctgcactgcttcttccagcccagggagttatcaagcaaaagcaagtgcttctgtgagaactgtgggaagaagacccgtgggaaacaggtcttgaagctgacccatttgccccagaccctgacaatccacctcatgcgattctccatcaggaattcacagacgagaaagatctgccactccctgtacttcccccagagcttggatttcagccagatccttccaatgaagcgagagtcttgtgatgctgaggagcagtctggagggcagtatgagctttttgctgtgattgcgcacgtgggaatggcagactccggtcattactgtgtctacatccggaatgctgtggatggaaaatggttctgcttcaatgactccaatatttgcttggtgtcctgggaagacatccagtgtacctacggaaatcctaactaccactggcaggaaactgcatatcttctggtttacatgaagatggagtgctaatggaaatgcccaaaaccttcagagattgacacgctgtcattttccatttccgttcctggatctacggagtcttctaagagattttgcaatgaggagaagcattgttttcaaactatataactgagccttatttataattagggatattatcaaaatatgtaaccatgaggcccctcaggtcctgatcagtcagaatggatgctttcaccagcagacccggccatgtggctgctcggtcctgggtgctcgctgctgtgcaagacattagccctttagttatgagcctgtgggaacttcaggggttcccagtggggagagcagtggcagtgggaggcatctgggggccaaaggtcagtggcagggggtatttcagtattatacaactgctgtgaccagacttgtatactggctgaatatcagtgctgtttgtaatttttcactttgagaaccaacattaattccatatgaatcaagtgttttgtaactgctattcatttattcagcaaatatttattgatcatctcttctccataagatagtgtgataaacacagtcatgaataaagttattttccacaaaaaaaaaaaaaaaaaaactcga

SEQ ID NO: 251 - DNA, 1446 bp, Homo sapiens
gcccatccccacaaaactccccctcaccaaagccgaggagaaggccttgaagagagtccggaggaaaatcaagaacaagatctcagcccaggagagccgtcgtaagaagaaggagtatgtggagtgtctagaaaagaaggtggagacatttacatctgagaacaatgaactgtggaagaaggtggagaccctggagaatgccaacaggaccctgctccagcagctgcagaaactccagactctggtcaccaacaagatctccagaccttacaagatggccgccacccagactgggacctgcctcatggtggcagccttgtgctttgttctggtgctgggctccctcgtgccctgccttcccgagttctcctccggctcccagactgtgaaggaagaccccctggccgcagacggcgtctacacggccagccagatgccctcccgaagcctcctattctacgatgacggggcaggcttatgggaagatggccgcagcaccctgctgcccatggagcccccagatggctgggaaatcaaccccggggggccggcagagcagcggcccsgggaccacctgcagcatgatcacctggacagcacccacgagaccaccaagtacctgagtgaggcctggcctaaagacggtggaaacggcaccagccccgacttctcccactccaaggagtgkttccacgacagggatctgggccccaacaccaccatcaaactctcctaggccatgccaagacccaggacataggacggacccctggtacccagaagaggagttcttgctcactaacccggatccgcctcgtgcccctgcctcctggagcttcccattccaggagaaaaggctccacttcccagcccttccttgcccctgaacatttggactcttcccttgggccgaccactctgttctcattctccttcccaccaacatccatccgtccttctcagacaaaccactcactgggtaccccacctcctctctcatatgcccaacacgaccactgcctccctgcccccacacctgcacccaaacagacacatcaacgcaccccactcacagacaccccttaccccacccccactgtacagagaccaagaacagaaattgtttgtaaataatgaaccttattttttattattgccaatcccctaagatattgtattttacaaatctccctcttcccttcgcccctcccttgttttatattttatgaagttagtgcgggctttgctgctccctggcccaggaaagagggactacctgaccctcacctggcacccccctgctgctgcccaagccgctgggcctttttaattgccaaactgctctcttcatcagctcagcacatgctttaagaaagcaaaaccaaaaaaaaaaaaaaaaagatgcagcatcaaaaaaaaaaaaaaaaaaaaaaaaaaaaaaaaaaa

SEQ ID NO: 252 - DNA, 2050 bp, Homo sapiens
  misc feature (596): n equals a,t,g, or c
  misc feature (1899): n equals a,t,g, or c
  misc feature (1922): n equals a,t,g, or c
  misc feature (1944): n equals a,t,g, or c
  misc feature (2012): n equals a,t,g, or c
  misc feature (2042): n equals a,t,g, or c
gcgcgagccaccttgcccagccaagacttttttatcaggacaaaggattgtgcatttaaactatttcactagaactgggtggtggttttgctctctttcttctgggtgaattggatttgcaggttatgctgttgagtgatgacgcatagctgcttttgctccatttyccccagatgacttggtaaattctccgtgaatgactctgctacataacctagataacctaagtgtgtcctttaaatgcatgtaagccagaagatgtatgttactttgaaaacataagtaacaaaattttgaatgtattgctaaagagatgtctctctgaagctcttttgatgtttggtgtcttgtccttcttattaaaccatatcttagtaaatagtttggtacgaatggatttatcactgagcaggtctgcaaaataattaatcggtaccgttttgtttctgttgatagaaataaaagagactgatggaagctctcagatcaagcaagaaccagaccccacgtggtagacctcttccctcctagggtaaatcagcttctgtgtcagggatgctgtgtggtgtccatctgaaccccctgcatacgcgtantaatgtgatctccccactttcacataagatggtggccctgccttcagggaatgtgggagccaggtgggagccttcccggatatttaagctagaagattctacagggagattctccttggatcaatatatgtctctcagtcaaagatgtaaaagcacttttgccttaaaaagaatgttctgtttctaaatagagtcaacgttgtcctcctcattggaattcactatgagtcagaatcattagactgacttttttttttccatagtaatagtattttgcagagtctcacagagctgcagatcttttgttcatcttgcagagttaacaagtctgatcctgttagtccagatttcttaaatttggccaagttataataggagcagtagcttgagacccgaagtcaggaaactttgacaatggatttttttttttaatccagagacttgtactggaatttgccttaccctgtcagctcatggacttaaggtttcatcccgctttatgagtgcttctgaatccaagtcattgttacctgaatttgcaaattaagttgtgatattcgtgactgttaaattcctgtaattagattaacctctttgcttgcttgtttgttttctctccctattttagccttaaagtatccagtggttgaagaaagagcttttcggacctgttactacccccaagctgtgtaatatacttgtataacagaaataccttcctatacaaacctttttttcctacttttagatagaaatgtcctactttttcagcagttctgtgaattaaagagcagagtgactgtgggtctggaatggctggtgtacttgggaatgtactatcaggattttacagcaatgctgggaaatgacagggaaaatgacaggaatgaatctcaccagattttttatgtactcagcagagccttgagttacggtgtttattttccaatcaagtgaagatatctcctacttctcctactggaacatctcagcttctgcagtgaagaaaaattcctgtgatagttcagttctttagtttttctatttgaaaaaaaaaaatcatttaaatgatcctttgttcacggctctccttaatgactgagtgaacagttcctatctgtatatttgactaaaccttttcctaagctatctctcatggttcctatgtttttttatcataattaaaagcaaaaccatctggatcacctaacagtcagaggtcagtatctcagcgtgtgaattatagaggaaatacagagagaaccycttccacttttacttttcgtcccaaataaaatgcatnggtgtaccagaagttgaagatcngggttgargattggggctagcncgatgacactwaggccccmacatcgcgggamctgctgtggcgcggattcttaggacgctgttttagcngggcccctctccaagggcgccgtgggcggnaatattcc

SEQ ID NO: 253 - DNA, 2529 bp, Homo sapiens
  misc feature (2523): n equals a,t,g, or c
  misc feature (2529): n equals a,t,g, or c
gggtcgacccacgcgtccgcagtgtgttctgcaaaaaatttgcggaasccttggggagcactgaagccaaggctgtaccgtaccaaaaatttgaggcacacccgaatgatctgtacgtggaaggactgccagaaaacattcctttccgaagtccctcatggtatggaatcccaaggctggaaaaaatcattcaagtgggcaatcgaattaaatttgttattaaaagaccagaacttctgactcacagtaccactgaagttactcagccaagaacgaatacaccagtcaaagaagattggaatgtcagaattaccaagctacggaagcaagtggaagagatttttaatttgaaatttgctcaagctcttggactcaccgaggcagtaaaagtaccatatcctgtgtttgaatcaaacccggagttcttgtatgtggaaggcttgccagaggggattcccttccgaagccctacctggtttggaattccacgacttgaaaggatcgtccrcgggagtaataaaatcaagttcgttgttaaaaaacctgaactagttatttcctacttgcctcctgggatggctagtaaaataaacactaaagctttgcagtcccccaaaagaccacgaagtcctgggagtaattcaaaggttcctgaaattgaggtcaccgtggaaggccctaataacaacaatcctcaaacctcagctgttcgaaccccgacccagactaacggttctaacgttcccttcaagccacgagggagagagttttcctttgaggcctggaatgccaaaatcacggacctaaaacagaaagttgaaaatctcttcaatgagaaatgtggggaagctcttggccttaaacaagctgtgaaggtgccgttcgcgttatttgagtctttcccggaagacttttatgtggaaggcttacctgagggtgtgccattccgaagaccatcgacttttggcattccgaggctggagaagatactcagaaacaaagccaaaattaagttcatcattaaaaagcccgaaatgtttgagacggcgattaaggagagcacctcctctaagagccctcccagaaaaataaattcatcacccaatgttaatactactgcatcaggtgttgaagaccttaacatcattcaggtgacaattccagatgatgataatgaaagactctcgaaagttgaaaaagctagacagctaagagaacaagtgaatgacctctttagtcggaaatttggtgaagctattggtatgggttttcctgtgaaagttccctacaggaaaatcacaattaaccctggctgtgtggtggttgatggcatgcccccgggggtgtccttcaaagcccccagctacctggaaatcagctccatgagaaggatcttagactctgccgagtttatcaaattcacggtcattagaccatttccaggacttgtgattaataaccagctggttgatcagagtgagtcaraaggccccgtgatacaagaatcagctgaaccaagccagttggaagttccagccacagaagaaataaaagagactgatggaagctctcagatcaagcaagaaccagaccccacgtggtagacctcttccctcctaggccttgagttacggtgtttattttccaatcaagtgaagatatctcctacttctcctactggaacatctcagcttctgcagtgaagaaaaattcctgtgatagttcagttctttagtttttctatttgaaaaaaaaaaatcatttaaatgatcctttgttcacggctctccttaatgactgagtgaacagttcctatctgtatatttgactaaaccttttcctaagctatctctcatggttcctatgtttttttatcataattaaaagcaaaaccatctggatcacctaacagtcagaggtcagtatctcagcgtgtgaattatagaggaaatacagagagaacctcttccacttttacttttcgtccaaataaaatgcatggtgtaccagaagttgaagatcgggttgaggattggggctagctcgatgacactaaggccccaacatcgcgggacctgctgtggcgcggattcttaggaacgctgttctagccggccccctctccaggggtcgccgtggccggcattatttcctagttcttcttgtaaccctgaggtgccagcgcggggagtgaggaggggtcagggggctaaggatgcaacctctgacgttctgcgccttcctaggagagtcttacatgtgttgagatttcacaagcaatgcgagttgtaaaataccagctctacaagaagctaggctctgtgacggcatagttttcagtagctttatcacaatattcacaatggagaattatatgacatggtagcagaaataggcccttttatgtgttgcttctattttacctcaaattgtagatatagggtaatcaataaaatccatccatgcctttcacacactaaaaaaaaaaaaaaaaaaaaaaaaaaaaaaaaaaaaaaaaaaaangggggn

SEQ ID NO: 254 - DNA, 1678 bp, Homo sapiens
  misc feature (1676): n equals a,t,g, or c
  misc feature (1678): n equals a,t,g, or c
aacagtgaatactgctacagtggcggggcagatgcctgcatccatagttggaagattccagacctcagcatggatccctatgatggctacgacccaagcgtgctgagccacgtcctggagggccacggggacgccgtgtggggcctggccttcagtcccacctcccagcgcctggcctcctgttctgctgatggcaccgtccgcatctgggaccccagcagcagcagcccggcctgcctctgcaccttccccacagccagcgagcacggggtccccacctcagtggccttcaccagcaccgagcctgcccacatcgtggcctccttccgctctggcgacaccgtcttgtatgacatggaggttggcagtgccctcctcacgctggagtcccggggcagcagcggtccaacccagatcaaccaagtggtgagtcatccaaaccagcctctcaccatcaccgcccacgacgacaggggcatccgcttcctggacaatcggacaggtaagccggtgcactccatggttgcacacctggacgcagtcacctgcctagccgtggaccccaacggcgcattcctgatgtcaggaagccatgactgctccctgcgtctctggagcctggacaacaaaacgtgcgtscaggagatcacggcccaccgcaagaagcacgaggaggccatccacgctgttgcctgccaccccagcaaggccctcattgccagtgctggcgctgatgccctggccaaggtcttcgtatgatgcccacctggccctgccctggccgccacgctggctggggtgtagggccgggcaggtggggctgaggggactcccagcctcgctggaggtgcagaggcctggcctctgtctgtttgccrtggagcctggtggtgctaacggccctttccccaggaatccctccccaacggctgccttccccaagcatccagcctggggatgggcccctttcaggaatcacccccgaggatggcctcggggtttccccctgtgccctgacagccgctcctggtatcagagctgctttccagagggcagcacagccagggccgggtgtctttagggatcagtttttccaagactccagaaggtgccaggttctccccttgagctcctgctcccccatcccccatcctcccagacctgggcaggagctgtgctgggagaaagggtggcagccgggagcctcagagctgagccccggcctggctgcccctcccctccggccctctccactgctttccagacactaaccaaggcttccaggccagggattgcccaacactcctagggcagccctcccagcgccccatggggtcgcccatgggtagagacggctttyttgtgcccctccctggggcatggagggtggagtgggcctcgggtccccctgaactccctgtatatctgtataaataacgggattttcatgcgccgccccacccgcattatcactgtgtgatggtctcagtcagtctcctccctgtctccactctttccctctatttatttcactctcttgtttggttctaccctgcaccctcggtccccttccaggttcctgtttataagccccaacccctctgtccccatcttgtatgtgaaaacttgtctcaataaaccctttggagtaaaaaaaaaaaaaaaaaaaaaaaggntn

SEQ ID NO: 255 - DNA, 966 bp, Homo sapiens
ggccatgagcgttcgtgtctgttgaacggctgtgggcgtcttgctgccttgggtagggggttaaaatcgttcttgagaggaacgtctctgtgcgaagagataatgagtttagctctgagaagtgagcttgtagtggacaaaacaaagaggaaaaaaagaagagaactgtctgaggaacagaaacaagaaattaaagatgcttttgaactatttgatacagacaaagatgaagcaatagattatcatgaattaaaggtggcaatgagagccttggggtttgatgtaaaaaaagctgatgtactgaagattcttaaagattatgacagagaagccacagggaaaatcacctttgaagattttaatgaagttgtgacagactggatattggaaagagatccccatgaagaaatactcaaggcatttaaactatttgatgatgatgattcaggtaaaataagcttgaggaatttgcgacgtgttgctagagaattgggtgaaaacatgagtgatgaagaacttcgagctatgatagaagaatttgacaaagatggtgatggagaaataaaccaagaggagttcattgctattatgactggtgacatttaaagaattacaaggataaacactaagaatgttgcagttaccatcttatattctatttttgtgcctggagccatgtgaaaaaaaccaacttagttcttttatcctaaaggaccaaaaataagcatcttatatatctgtattttactactgttaagtttctttgtatgaactgtgttgttagtactcagatagtttagctttgtatttataatagagcttttatataaagttttaaaaattgaatgtgtgatatgtgttctttgaaggttttttaatttaacatttatagtcactttttagtgcacacattttccagactttcgttaataaaatatttattttattagaattttaaaaaaaaaa

SEQ ID NO: 256 - DNA, 3091 bp, Homo sapiens
  misc feature (3040): n equals a,t,g, or c
gagccagcagtgacatcagccttgatgaacagtacaagcatcagctggaggagaccaaaaaggaaaagagaaccagaataccatacaagccaaactatagcctcaatttatggagcatcatgaagaactgcattggaaaagaactctctaagatccccatgccggtaaactttaatgagcccttgtccatgcttcagcgccttactgaagatctggaataccatgagctgttagaccgagctgcaaaatgtgagawttctctagaacagctctgttatgttgcagctttcaccgtgtcctcctactccactactgtyttccgcaccagtaagccattcaacccactgcttggggagacctttgagctggaccgwttagaggagratgggtaccgatccctctgtgaacaggtgaagtcatcatccccctgctgctgcgcaccatgctgagtccaaaaatggctggacattgcgtcaggaaatcaaaatcaccagcaagtttcgaggcaaatacctctccattatgcccctcggtaccattcattgtattttccatgcaactgggcaccactacacttggaagaaagttaccacaactgtacacaacattattgtgggcaagttgtggatagatcagtctggcgaaattgatattgtgaatcacaagacaggagacaagtgtaatcttaaatttgttccttatagctacttctctcgggatgtagcaagaaaggtgacgggggaagtgacagatccatcaggaaaagtccactttgctcttctggggacgtgggatgagaaaatggaatgtttcaaagtacagccagtcattggggaaaatgggggtgatgctcgacagagaggccatgaagcagaggaaagcagggtcatgctgtggaaaaggaatcctttaccgaagaatgcagaaaacatgtactacttctcagagcttgctctgactctcaatgcttgggaaagtggcactgcccccacagacagccggttacgacctgaccagagactgatggaaaatggacgctgggatgaagcaaatgcggagaagcagcgcctggaggaaaaacaaagactttccagaaagaagagagaagcggaagctatgaaagccacagaggatggcacaccatatgatccctataaggcactgtggtttgagcggaagaaggaccctgttaccaaggagttaacccatatttataggggagaatactgggagtgtaaagaaaaacaggactggagctcatgcccggacattttctgaaacggcagtaacaaaaaagaggagcatataatggagaagaggacagaggatgtgtgggaaagctggaagttgtgactctcttaccaagtgctttcctcaagtttgtctctcttgaccaatcattttttccaaatcaatcaccagaaggagacaccagtggtggtgattggctggttgccttagctgattgaaactgaaatcgacataggagatactatgtctgtaagggagaggtttagtggccgaagttagtgttattccacatccacgaatcaagtattcttggctcttctttctccctctgcccccatttaagacaatgtcactcaccctccccttgtagtatcctgctcagccaagatctgcctaagattatgattcaggggcattttggtgctgttaaaagcaagagccgaatttagaagttcccttaaaaagaaacacataagacttaccaatggaggcattgtgaatggttgcagtggagcttaggtataacatcatcaagtgtgttcacacgcggggtcggtttaatggagtgtccacgcggagataactgcgatattggaacacctgtgagagagattgttctatagggctggaatattcagagttacattcttggaagtttctgtttttacttgcatcaaacacccctctgttgttctccatcatctttaatagcaactggagaccactttggtcattggtaagggggtgcattctcctcacaaaggggttttatggacttcctcaggcggagagcttctgagaacacaggcaggatggaaaaagactactagccacttttgctttcccaaccccccttaatgccatccttcattgtctttctggcttctcttcttctggcacagtaccattttgggtctgtgccccagtgtggagcaaaacattgcctgtcccattctgatatacttcagaatttgagagcagaagttaatgtggaacaaaagttttcaccatctctcaagccccaaggactggagccacctctggaataatgtgttaaatatctgtatattatatatatgtagagaaaaatctaattttttggtttgatttccttcccattaagaatcttgktttttgatacccttgtctccctgagactctttcttggacacgtgttgatgtggatggcactcctgctctccatcttttatgggcagagagatttcaaaacctgagcaggatcatgtctggcagttactaaacagggactttgtcatggtttgtatcatggggtgcctactgctgtctaaactctgctctcctaattagctgactcttgaaaatgaaatcctaacctctttcctgcctcttttctttctcttttcaggaagagtgtgggtagaaagtccggagggcaacttccaatttaattctgctctgtccggcgcataggctgaattccaaaagaactttcttcctaggatgtggggcttaaagcaccgtcatgtggggtggatcagataattgctcctgtggggccctggcttccttctctgtttgtgcagtatttgtttttgttgtcttgttgagaaatatcccctgtgcaacccacccttggttgaggatcacaaattgaggtgccttccttgtatgctttttgttagtattttttgtttttgttccytaactgctgagcctcagccagcgtgggtcctgggggaaataccattccaaaggaagccatccctatggggaaattggttttactgggtaaattaatacttttatntcttcccctatcccttccttcctagttgtgataaacatgggagaggagtga

SEQ ID NO: 257 - DNA, 2952 bp, Homo sapiens
tcatcctacatgagagggggttatttctccagcagccatgaaggtttttcatatgaaaaagatccccgattatactttgacgacacttgtgttgtgcctgagagactggaaggcaaagtcaaacaggagcctaccatgtatcgagaggggcccccttaccagaggcgaggttcccttcagctgtggcagttcctggtcacccttcttgatgacccagccaatgcccacttcattgcctggacaggtcgaggcatggagttcaagctgatagaaccggaagaggttgctcggcgctggggcatccagaagaaccggccagccatgaactatgacaagctgagccgctctctccgctattactatgaaaagggcatcatgcagaaggtggctggagagcgatacgtctacaaatttgtctgtgacccagatgccctcttctccatggctttcccggataaccagcgtccgttcctgaaggcagagtccgagtgccacctcagcgaggaggacaccctgccgctgacccactttgaagacagccccgcttacctcctggacatggaccgctgcagcagcctcccctatgccgaagtttgcttactaagtttctgagtggcggagtggccaaaccctagagctagcagttcccattcaggcaaacaagggcagtggttttgtttgtgtttttggttgttcctaaagcttgccctttgagtattatctggagaacccaagctgtctctggattggcacccttaaagacagatacattggctggggagtgggaacagggaggggcagaaaaccaccaaaaggccagtgcctcaactcttgattctgatgaggtttctgggaagagatcaaaatggagtctccttaccatggacaatacatgcaaagcaatatcttgttcaggttagtacccgcaaaacgggacatagtatgtgacaatctgcatcgatcatggactactaaatgcctttacatagaagggctctgatttgcacaatttgttgaaaaatcacaaacccatagaaaagtaagtaggctaagttggggaggctcaaaccattaagggttaaaaatacatcttaaacattggaaagctcttctagctgaatctgaaatattaccccttgtctagaaaaaggggggcagtcagaacagctgttycccmctccgtggttctcaaaatcataaaccatggctactcttgggaaccacccggccatgtggtcgccaagtagagcaagccccctttctcttcccaatcacgtggctgagtgtggatgacttttattttaggagaagggcgattaacacttttgacagtattttgttttgccctgatttgggggattgttttgttttggtggttgttttggaaaaacagtttataaactgatttttgtagttttggtatttaaagcaaaaaaacgaaaaacaaaaaaacaaaaacaaaccttttggtaactgtgcactgtgtcctttagccagggccgtgccaacttatgaagacactgcagcttgagaggggctttgctgaggcttccccttggccatgtgaaagcccgccttgttgcctgctttgtgctttctgcaccagacaacctgatggaacatttgcacctgagttgtacatttttgaagtgtgcagggcagcctggacacaagcttagattctctatgtatagttccccgtgttcactaacatgccctctctggaaagcatatgtatataacatgtgtcatgtcctttggaaacctggtcacctggtgaaaacccttgggattcttccctgggcatgactgatgacaatttccatttcatcagtttgttttgttttcctttttctttaaatcttggactttaaaccctacctgtgtgattcagtagggtttgagacttacgtgtgatactgacaggtaagcaacagtgctagcattctagattcctgcctttttttaaaaagaaattattctcattgctgtattatattggaaaagttttaaacaaccaagctaaagctatgtgaaagttgagctcaaagtagaggaaaagttactggtggtaccttgctgcctgctctgctggtagaattctgtgctccccgtgacacttagtacattaagaatgactacactgttcctcgtatgtgaaggaggcagtgctgactccgtgagtgtgagacacgtgctttgaactgcttttctattcatggagcactccatagtctcaaactgtcccccttatgaccaacagcacatttgtgaagaggttcgcagggataaggggtgcactttatagctatggaaacatgagattctcctctattggaagctaattagcccacaaaggtggtaaacctgtagattgggccttaattagcattgtactctaatcaaaggactctttctaaaccatatttatagctttcttaacctacacatagtctatacatagatgcatattttacccccagctggctagagatttatttgttgtaaatgctgtatagatttggttttcctttctttacttaccctggtttggatttttttttttttttttttgaatggatttatgctgtcttagcaatatgacaataatcctctgtagcttgagctacccctcccctgctgtaacttacgtgacctgtgctgtcactgggcataggacagcggcatcacggttgcattcccattggactcatgcacctcccggatggtttttgtttttttcgggggttctttggggtttgtttgtttgcttcttttccagagtgtggaaagtctacagtgcagaaaggcttgaacctgccagctgatttgaaatactttcccctgcgcagggccgtatgcatcctgccaagctgcgttatattctgtactgtgtacaataaagaagtttgcttttcgtttaaaaaaaaaaaaaaaaaaaaaaaaaaaaaa

SEQ ID NO: 258 - DNA, 2217 bp, Homo sapiens
gaattataggaaaggaagataacagtgagaaaccaaacattacaaaaggtggtttagctctccttgaaaaatatactaagttggtatactataacacttggctatatgtaggcaatgtcactactgggcaaatacacttactgtgttctagaggcagccctttcttatgcagaaaatacaatacgcactgcatgagaagcttgagagtggattctaatccaggtctgtcgaccttggatatcatgcatgtgggaaggtgggtgtggtgagaaaagttttaaggcaagagtagatggccatgttcaactttacaaaatttcttggaaaactggcagtattttgaactgcatcttctttggtaccggaacctgcagaaacagtgtgagaaattaagtcctggttcactgcgcagtagcaaagatggtcaaggccatggaaaaagcagaaatttaccaagaaagctgatacccatgtatagttcccactcatctcaaatacatctgctatctttttaagctaagtcctagacatatcggggataacatgggggttgattagtgaccacagttatcagaagcagagaaatgtaattccatattttatttgaaacttattccatattttaattggatattgagtgattgggttatcaaacacccacaaactttaattttgttaaatttatatggctttgaaatagaagtataagttgctaccattttttgataacattgaaagatagtattttaccatctttaatcatcttggaaaatacaagtcctgtgaacaaccactctttcacctagcagcatgaggccaaaagtaaaggctttaaattataacatatgggattcttagtagtatgtttttttcttgaaactcagtggctctatctaaccttactatctcctcactctttctctaagactaaactctaggctcttaaaaatctgcccacaccaatcttagaagctctgaaaagaatttgtctttaaatatcttttaatagtaacatgtattttatggaccaaattgacattttcgactattttttccaaaaaagtcaggtgaatttcagcacactgagttgggaatttcttatcccagaagaccaaccaatttcatatttatttaagattgattccatactccgttttcaaggagaatccctgcagtctccttaaaggtagaacaaatactttctatttttttttcaccattgtgggattggactttaagaggtgactctaaaaaaacagagaacaaatatgtctcagttgtattaagcacggacccatattatcatattcacttaaaaaaatgatttcctgtgcaccttttgggcaacttctcttttcaatgtagggaaaaacttagtcaccctgaaaacccacaaaataaataaaacttgtagatgtgggcagaaggtttgggggtggacattgtatgtgtttaaattaaaccctgtatcactgagaagctgttgtatgggtcagagaaaatgaatgcttagaagctgttcacatcttcaagagcagaagcaaaccacatgtctcagctatattattatttattttttatgcataaagtgaatcatttcttctgtattaatttccaaagggttttaccctctatttaaatgctttgaaaaacagtgcattgacaatgggttgatatttttctttaaaagaaaaatataattatgaaagccaagataatctgaagcctgttttattttaaaactttttatgttctgtggttgatgttgtttgtttgtttgtttctattttgttggttttttactttgttttttgttttgttttgttttgttttgcatactacatgcagttctttaaccaatgtctgtttggctaatgtaattaaagttgttaatttatatgagtgcatttcaactatgtcaatggtttcttaatatttattgtgtagaagtactggtaatttttttatttacaatatgtttaaagagataacagtttgatatgttttcatgtgtttatagcagaagttatttatttctatggcattccagcggatattttggtgtttgcgaggcatgcagtcaatattttgtacagttagtggacagtattcagcaacgcctgatagcttctttggccttatgttaaataaaaagacctgtttgggatgtaaaaaaaaaaaaaaaaaaaaaaaaaaaaaaaaaaaaagggggggggg

SEQ ID NO: 259 - DNA, 1240 bp, Homo sapiens
  misc feature (1240): n equals a,t,g, or c
ggcctggagtaccccatgctgcactatgtgggcttcgtccctgtcattgatggagacttcatccccgctgacccgatcaacctgtacgccaacgccgccgacatcgactatatagcaggcaccaacaacatggacggccacatcttcgccagcatcgacatgcctgccatcaacaagggcaacaagaaagtcacggaggaggacttctacaagctggtcagtgagttcacaatcaccaaggggctcagaggcgccaagacgacctttgatgtctacacygagtcctgggcccaggacccatcccaggagaataagaagaagactgtggtggactttgagaccgatgtcctcttcctggtgcccaccgagattgccctagcccagcacagagccaatgccaagagtgccaagacctacgcctacctgttttcccatccctctcggatgcccgtctaccccaaatgggtgggggccgaccatgcagatgacattcagtacgttttcgggaagcccttcgccacccccacgggctaccggccccaagacaggacagtctctaaggccatgatcgcctactggaccaactttgccaaaacaggggaccccaacatgggcgactcggctgtgcccacacactgggaaccctacactacggaaaacagcggctacctggagatcaccaagaagatgggcagcagctccatgaagcggagcctgagaaccaacttcctgcgctactggaccctcacctatctggcgctgcccacagtgaccgaccaggaggccacccctgtgccccccacaggggactccgaggccactcccgtgccccccacgggtgactccgagaccgcccccgtgccgcccacgggtgactccggsgccccccccgtgccgcccacgggtgactccggggccccccccgtgacccccacgggtgactccgagaccgcccccgtgccgcccacgggtgactccggggccccccctgtgccccccacgggtgactctgaggctgcccctgtgccccccacagatgactccaaggaagctcagatgcctgcagtcattaggttttagcgtcccatgagccttggtatcaagaggccacaagagtgggaccccaggggctcccctcccatcttgagctcttcctgaataaagcctcatacccctgaaaaaaaaaaaaaaaaaaaaaaaaaaaaaaaaaaaaaaaaaaaaaaaaaaggggggggggccn

SEQ ID NO: 260 - DNA, 610 bp, Homo sapiens
  misc feature (559): n equals a,t,g, or c
ttcgtccccgctgcgcccgctgctgctggccctggcccttgcctccgtgccttgcgcccagggcgcctgccccgcctccgccgacctcaagcactcggacgggacgcgcacttgcgccaagctctatgacaagagcgacccctactatgagaactgctgcgggggcgccgagctgtcgctggagtcgggcgcagacctgccctacctgccctccaactgggccaacaccgcctcctcacttgtggtggccccgcgctgcgagctcaccgtgtggtcccggcaaggcaaggcgggcaagacgcacaagttctctgccggcacctacccgcgcctggaggagtaccgccggggcatcttaggagactggtccaacgctatctccgcgctctactgcaggtgcagctgatgcattgctggtctctcatctgcagcttccacagagtgccaagcccctcactcagcccatccctgggctctgctccggggccccaagacccaggaggaggagcgttctgcctgccccytcccacctyccctgcaatacaagcctttgtgcagntgtaaaaaaaaaaaaaaaaaaaaaaaaaaaaaaaaaaaaaaaagggcggcc

SEQ ID NO: 261 - DNA, 2116 bp, Homo sapiens
  misc feature (4): n equals a,t,g, or c
  misc feature (7): n equals a,t,g, or c
  misc feature (16): n equals a,t,g, or c
  misc feature (25): n equals a,t,g, or c
  misc feature (35): n equals a,t,g, or c
ctcnccnctctcctcntgaaaaccnctatagggantgctggtacgcctgcaggtaccggtccggaattcccgggtcgacccacgcgtccgaaatgaatagatgggccagctggaaaggtgacccacagctaagggccatcttattgaacccccaagaagtcaaatgtagtcatccctaaccaaccacagggcacttgtgcgcgcgcacacacacacacacacacaaatatgcaaatactcattgaactcaactcccttgaggtttgaatgaataaatataatccaattttcaaagtctttaaccacatttgggaatctaagtatttgttctcagtataccaatgacatattctttctggcaaaagaaatttcctttccccagacaaataaaactagtacaaggacgcatactctcaacagaaatcctgggaaatcctgcaagagaaagagaatccctactactttgtttcctgcttccctaaccaagcatccgacattccaacatcaaagcttttagtcaccacattttattagcgttgaatatcctctctacctccgaaccaacccctgccattctgcctaaactgtgcccatatatttagacctgtctcaaatattattttgaccagaaagtctgacctcccagcaggatcaacttttccttcctttgtctttctttctttcagccttactttgacattcagctgatcattccctgtcttatcttgcttgtgctcaccgctgtctgtccttttacgtgtggaggtcagaaacgtgtctggttcgtgtacatcacctcagcaccctgcacaggggatggcacaaaacagccactcaaaaagtaattgttgattacaattgatctgaccatttcctttggtgacccttttgtctttgtggtagaccaaagtcatgatctttgatccctcctgccatgttctcagaagccttgtgcttgggatttggacaaagtgaccctttttatagaggttatttttttcccattcctccagctccttctttgctgtttttctagtgcccatagtagcagatgcacatacttcaacaccctttcctaaaaattctgagctacccatacattattttattgttaaattgaaatggaaatttgctttgataagaatctctcagtaagagtctattatccgtgttatagatgtatctcctaccgtgcaaatgttagttttctcctgtgtttactttttcatgtattttgtattttggggacctttgtggagcttacatttcagtctttgttagcctaattgctattcaatatctatatcaataattgttcttcccaaagggtgaagaaaaaaatggactacttcaaaacaaacacaccattcagttttctaaaagagctgacttcacaagactgctcagaatcgcgactggcagcttctgcctttgtgggaaggcatgagtgtttagtcatttcactgtgttttgcaatcacagaaagcagatcagggaaggtgggagttgtagatctcacattttgagccctgaatctcagatactgcagaaaactttcaacgacatcactaaacaattctaccgttcaagaggctctttaaacagacctgtttttacgaatggctattttttatattaaaccaaccaccctggtgggtgcctgcatcattggttttttggccccaaaccaggttgccgaagagagtagcagtacctctatgaaagccagcagaggggtaggtagactgatgtttgatcccagttcttagaagagcctcaagaaaggactttgtgagggtttaacatcttaagctcctgtgatcaaaacagagtcaacatgagaaatgtgaggcggtcttcagagacagctccataaactgtctggaggctgggaaaraatttgtcatgcatgcttaatatgtaaagcactctttagaataaatggaaattggtgatggtaaaaaaaaaaatttaaaaaaaaaaaaaaaaaaaaaaaaaaaaaaagggcggccgctctagaggatccaagcttacgtacgcgtgcatgcgacgtcatagctcttctatagtgtcacctaaattcaattcactggccgtcgttttacaacgtcgtgac

SEQ ID NO: 262 - DNA, 1557 bp, Homo sapiens
  misc feature (1): n equals a,t,g, or c
  misc feature (9): n equals a,t,g, or c
  misc feature (1347): n equals a,t,g, or c
  misc feature (1527): n equals a,t,g, or c
  misc feature (1533): n equals a,t,g, or c
natgcccantcctatagggaagctggtacgcctgcaggtaccggtccggaattcccgggtcgacccacgcgtccgaaaatcatcaactaagaaggggccatcagtatagagaacgttagcctgtggagctgtgaatgtgatggagacaagatttagtgtatagctctgctacctgcctggtgttcctttgagtttctttatccttagatttgacagctgagaaatctaggtggattcatattcgtaatcattgattaacatgcacatttgggtttgcacatttttgtttatcatacatttttctccgttttctattaaagaacatgctctaggggaactattaatagcccaccagtcgggtaggcagcattcaatccttctatgccttctttcgccacctgttgaggtctttcttctgaaacaaagaagaaatagacaaatcagacttgccctcttggaaatgtggtccagatttctctactcccaagctccaaaaaaggcatacattggatgggctagatcaactcctcctgagagccataaatccgccaagagttgttttccatgtaagggtgtggtacaatggggaacgcctgatgttggaggaaagcaggaggactttagagtggagttgcattctaatctctctgccgcttcaactatgtgacctggggcaaatgatataaactctatgagcctctttccttatctttaaaatgaagagaagtaatacctaccttgtagggctgttgtgaggattaaatgaagtaatgcatacagtgcctaacaaagtatttaacatcatattttttaaaagctcatgaaatattagtttttcttccttcccctctttctattttctctcctgttcccttttctctccctcctctgccctctccttccttcagatgttagtctaaaacagcaccttggatctaagcagcacctttgagaaagaaaagactgcttcaagaatgtctagttgcacctcctttccgtatgtggcctaaatgcctaggttggatcaatagtttaatttttttattgaactgtttaatattgactatggacttacattcacttttactgttttctgtatatttacttttgcttgaagtgttttaatattgactatttacctctgctcatttttattgattttctgtattttttcaatgaaaattataataaaaattatttttgttaaaaaaaaaaaaaaaaaaaaaaaaaaaaaaaaagggcggccgctctagaggatccaagcttacgtacgcgtgcatgcgacgtcatagctcttctatagtgtcacctaaattcaattcactggccgtcgttttacaacgtcgngactgggaaaaccctggcgttacccaacttaatcgccttgcagcacatccccctttcgccagctggcgtaatagcgaagaggcccgcaccgatcgcccttcccaacagttgcgcagcctgaatggcgaatgggacgcgccctgtagcggcgcattaagcgcggcgggtgtggtggttacncgcagngtgaccgctacacttgccagcgcc

SEQ ID NO: 263 - DNA, 1654 bp, Homo sapiens
ctccactgcaccaacgcctgtgatggataattcccggaatgctcctttggctggttttggttatggcttgccaatttctcgtctgtatgcaaagtactttcaaggagatctgaatctctactctttatcaggatatggaacagatgctatcatctacttaaaggctttgtcttctgagtctatagaaaaacttccagtttttaacaagtcagccttcaaacattatcagatgagctctgaggctgatgactggtgtatcccaagcagggaaccaaagaacctggcaaaagaagtggccatgtgaagagggacactcaggacactttacgggatcaaagtgggtctacaccagtgctgcttcctgaatgtttgtgtgtgaacccttgtttcctccaaaacaaacgacagcaacgaaaactccttaatcagaacactgatccaatgaggaatggagcttgtttctgtgacccaggagaacttagtgcaagactacaggagttaacagatggccagctccttattttttaatgtagaataactcctgagtttatatcaaatcctgaagaaataagcctcagttttccatctgtttttgataagaataagaaagggagtgagtgtgaagatggtggttagcagtttcactagactgatattttaggcctcttgttcacatcaaaagatattggtgtcagaataccagcattttcctgccatgcaaaggattaaaacttagtttacactatgtggttacaaatatatgtcaatgtacattttgaacatatttatgtgctatggaaggaaatgctggtgactaaaataaggtttactctgaaagaggaggaattttattcaaagcattcaaacattttattcaagtgtttcaaaattcaaagcattgtattcaaagttgcagtgaaggcatcaacttatgtaaaaactcagaaggaaggctcctctgataaaaacacagctcctttattatgctgcttttcttgttcactttacacactaagtaaacacttattgtcaggtgcctagtcttgagtgaattgttagatgtgcactgaactcgggatgttggggattggagagagagaattgccaaagtaacagcaaaaatatctcttactttgctttgtttataaataaattagtagattggaaaaactagtgttagggaaagaaatcacatgttcagagcctaattcagtaggaagggcttttctctaccctgaaatgaaggtaatccaaaggcatccattttctaggcttaaaagatatatttttgatatatttaatkatattctctacactccagcattaatatgtctgtttaaaaattactaattctcaaatggctcaagaacattagaatttaagtaccttttagagtaattattttaagcaaatagcctggacgtaagagattctcatgccagcatgctttcatttgtcagttgttgtgactgagagataatgaatgacacctgaaatgcatatggtatttttgggagagttaaggtataatttgaaggttggcagaccagttgygctgattactcttagagaagaagaaatggraaaatgaaagaaggcaggaaggaaagaaaggatataggaagagagggaagcagaaggcaggcattttttc

SEQ ID NO: 264 - DNA, 1168 bp, Homo sapiens
tccgccagcacaaaatatctgaaacactggagagtcgacatcacaagatcaaaactggttcccctggaagtgaagttgttactctacaacagtttttggaagaaagcaataagcttacctcagtacagataaagtcctcaagtcaagagaatcttttagatgaagtaatgaaaagtttgtctgtctcttctgactttttgggaaaagacaaaccagttagctgtggtctggccaggtcagtaagtggaaaaaccccaggggacttctatgatagacggacaactaagcctgagtttttgagacctggtcctcgaaaaactgaagatacctacttcattagttctgcgggaaaacctacaccaggcactcaaggaaaaataaaattagtaaaagaatcttctctgtcacgacaatcaaaagatagtaacccttatgcaactttacctcgtgcaagcagcgtgatctcaactgccgaaggaactacacgaaggacaagcatccatgattttttgaccaaggacagtagactgcctatatcagttgattcaccaccagctgctgctgacagcaacaccactgcagcatctagtgagtaccmtttacaccagtggtcctctcatatacttgacatcccaacacatactataggttcttgtgcccaaaatgatttagctatagacatgcctgagcctctatatgcccaggctagaaactcaagaacaggaaggtcacattttctaaaccaaacttttgccactattaggatgcctagtgatgcattcggaatgttggcaaaagatagcataggaccatttactgtggcccattcatctcagccattcttatccctgaatacagaattagttagtaacataagtgggttacctcctaggccagtcatcagaataactgaccaggcttctgcctctttggataaacctgcacagaaagaaaatgaacagttttctgatcatcagaaccctagtaacagtaacctacagttttctataaatagcaacaatcttgtcacttctgcatgcctctatcctgatgacacagaagctgcattgttggtttctgaggataatcaaactgtttggtatgaatatggttgtatatgatcaaaactgcacaatataatatattgatgttatttgataaaaaaaaa

SEQ ID NO: 265 - DNA, 1757 bp, Homo sapiens
aattttactaagggataatgttttcttttgtcactgatttaaatgtacctggatgtttctcagccatttggctaagatcgaacacaagtaatacctgggccttttatatctaatctaatgtagaccagcctgttaaaagagaaagacaattggttaaactgctgatgtgttgctttgtcttctcaaaagcttgttctataatacaatatgtaaaaagttgttacagtgtagtaaccgtagataatccctttatgatttgtacctaatggcgaagaccttttattttctgaaaataacgtgtttgttttcattaccgacattagaagccaatatttattaatctatttctcatcctgacattycagtcagactcttaaaataatcttgctgtgktttgatttaatgtgcttatcaacttatratattgaattaatgttaatagtgtcattttaggtgaactagacttcattgaaggaggtgggagccttatggagagagagtatatgattatctctatttgtatttaattaccatttcatctaaccattcagaacatatttcaagaataattttaattcaagttgtagataaaacttactataccrttttcwttttgacgctttccaagaatgagatacacggtattttaaagacaaagattgatcttacatgttactattaaaaaataayrataattttgttctacatttatacttttaattttyctgtggataataagamatgccaagmgkcgattgtgtccatgctggcaagtggcctaataaattgtccttttatttggtggtcctcagagtggcagttaacatcttgctattctgccttgtggacttgaggtggaaaggttcatggaattatatccttgcttttggatgtgcaaactgaggctcagagagtttaagacacatagtcactttcaccaattaaatgatgaagctgccatgtaaacgtatttcatcacactcccgagaccttcttctccagtagtgttttcaagctttttgagcatgcagacactaccatcaaaaaattatgtagagacatacttgagagttacagtttaaagaaaaacaaggtgtaattatttggttattagtagcatttacatatgcttgaaaacttctgctatatatacagtaagattaatttattctaacaatgatcttgataatccccctgattcccagactccttggaatagctccacagctatcagtggttctgccacaggttcagagccttcccagtactgccttcttatttgagaggtgtgctaagagctataaagcrgaggcttcaattgtacacagtttggaagtttaggcaaaagtcatttcttccctatattttgtcatgcttatctcctgtctctttctgttttacagattagcaataaactccttaaaacccaaaggtttgggcttctgttcctttcacttgcagtcagacatggagttagtggtagaagaaacagaaggggtaacctgcatggtgacagctactgaggggatggataggaaagcaggctgagtccctggggccagtggttaccaaagccaaggagagagcaaggggagcccagtgggcctggccatggactgctctggaattccgagtgtgaactttcagccaagaaggtagtgtgaaaatattactgtgaggttttaaaagtacacaaataacaattgttttttgtaaaaaraaaaaaaaaaaaaaaaaaaaaaaaaaaaaaaaaaaaa

SEQ ID NO: 266 - DNA, 414 bp, Homo sapiens
aatacggaacactgtcaatggactgcaccttgtgaaggaaaaacatgcttaagggggtgtaatgaaaatgatgtagacattttaagcattttctacacagcgagaaaacttcgtaagaacatgttacgtgtgcacaggtaaacagaaatcctttcataaagcaccagcagtgtttaaaaaatgagcttccattaatttttactttttatgggttttgcttaaagatctcaacatggaaaaatcctgycatggctctgaactgcacaatgcattgaaccgccgtccttcaattttcttcacactatcaacactggcagcattttgctgsttttatcaaaatgggttatttttagggaaactttttccacctttctggatgggaagagggtttccacaatggttttaaactcatcg

SEQ ID NO: 267 - DNA, 1452 bp, Homo sapiens
tacgctttgtgttctcatcggagctgcatgggaagtctgcatacagcaaagtgacctgcatgcctcaccttatggaaaggatggtgggctctggcctcctgtggctggccttggtctcctgcattctgacccaggcatctgcagtgcagcgagacccatccactgtggaggacaagtgtgagaaggcctgccgccccgaggaggagtgccttgccctcaacagcacctggggctgtttctgcagacaggacctcaatagttctgatgtccacagtttgcagcctcagctagactgtgggcccagggagatcaaggtgaaggtggacaaatgtttgctgggaggcctgggtttgggggaggaggtcattgcctacctgcgagacccaaactgcagcagcatcttgcagacagaggagaggaactgggtatctgtgaccagccccgtccaggctagtgcctgcaggaacattctggagagaawtcaaacccatgccatctacaaaaacaccctytccttggtcaatgatttcatcatcagagacaccatcctcaacatcaacttccaatgtgcctacccactggacatgaaagtcagcctccaagctgccttgcagcccattgtaagttccctgaacgtcagtgtggacgggaatggagagttcattgtcaggatggccctcttccaagaccagaactacacgaatccttacgaaggggatgcagttgaactgtctgttgagtccgtgctgtatgtgggtgccatcttggaacaaggggacacctcccggtttaacctggtgttgaggaactgctatgccacccccactgaagacaaggctgaccttgtgaagtatttcatcatcagaaacagctgctcaaatcarcgtgattccaccatccacgtggaggagaatgggcagtcctcggaaagccggttctcagttcagatgttcatgtttgctggacattatgacctagttttcctgcattgtgagattcatctctgtgattctcttaatgaacagtgccagccttcttgctcaagaagtcaagtccgcagtgaagtaccggccatcgacctagcccgggttctagatttggggcccatcactcggagaggtgcacagtctcccggtgtcatgaatggaacccctagcactgcagggttcctggtggcctggcctatggtcctcctgactgtcctcctggcttggctgttctgagagctccgctgagcatctggccttgaagtttgtgttcttccctctggcaatggctcccttcagcacttctgctttccactccaattcacacaggcttggtattaacagaatcaaggccaggctaggttaggaaaagggaagagctttcaccttctttaaaactctsggctgggcgcagtggctcatgcctgtaatcccagcattttgggaggctgaggcaggtggatca

SEQ ID NO: 268 - DNA, 3059 bp, Homo sapiens
  misc feature (432): n equals a,t,g, or c
ggcaacacataccatacagagaagataaaaacctcactggcactgcccgatatgctagcatcaatgcacatcttggtattgagcagagtcgccgagatgacatggaatcattaggatatgttttgatgtattttaatagaaccagcctgccatggcaagggctaaaggctgcaacaaagaaacaaaaatatgaaaagattagtgaaaagaagatgtccacgcctgttgaagttttatgtaaggggtttcctgcagaatttgcgatgtacttaaactattgtcgtgggctacgctttgaggaagccccagattacatgtatctgaggcagctattccgcattcttttcaggaccctgaaccatcaatatgactacacatttgattggacaatgttaaagcagaaagcagcacagcaggcagcctcttccagtngggcagggtcagcaggcccaaacccccacaggtttctaagcatgaattgaggaacagaagaagcagagcagatgatcggagcagcatttgtttctccccaaatctagaaattttagttcatatgtacactagccagtggttgtggacaaccatttacttggtgtaaagaacttaatttcagtataaactgactctgggcagcattggtgatgctgtatcctgagttgtagcctctgtaattgtgaatattaactgagatagtgaaacatggtgtccggttttctattgcattttttcaagtggaaaagttaactaaatggttgacacacaaaaattggtggagaaattgtgcatatgccaattttttgttaaaaccttttgttttgaactatactgctttgagatctcatttcagaagaacggcatgaacagtcttcagccacagttgtgatggttgttaaatgctcacaattgtgcattcttagggtttttccatccctggggtttgcaagttgttcacttaaaacattcttaaaatggttggcttcttgtctgcaagccagctgatatggtagcaaccaaagattccagtgtttgagcatatgaaagactctgcctgcttaattgtgctagaaataacagcatctaaagtgaagacttaagaaaaacttagtgactactagattatccttaggactctgcattaactctataatgttcttggtattaaaaaaaaagcatatttgtcacagaaatttagttaacatcttacaactgaacatgtatgtatgttgcttagataaatgtaatcactgtaaacatctatatgatctgggattttgtttttattttgaaatgggagcttttttgtttacaagttcattaaaaactaaaaactgtttctgtaaggaaatgagattttttttaaacaacaaaaaatgccttgctgactcactattaaataaaaatctccccaattttttgatagactacttcaagccatttgttacatggtattcctttgcaagtcaatttaggtttcgtgttataacttttcctctttttttaagaaaaatgaaaaaagtaattcttttgtctgaaggggaaaggcattctttcatttttttctttttttttttttttttttatgacttgcaggcacaatatctagtactgcaactgccagaacttggtattgtagctgctgcccgctgactagcagctggactgattttgaataaaaatgaaagcattaaagggtttccctacaaaacatttttctttaaaatacttttgaaatggctataagcagttgactttcacccttggagagcatcacactgtgtgaggttcagtgattgttgaccctccccagcccctcctgcttctttaagttatctgtgtgcgtgcgcttcctctcaatcttctttgcacgctcatttctttttctctgacccatgagaaaggaaaacttactgatgataatttttaaatagtgtaatttattcatttatagcatgtcaggataaattaaaagaacatttgtctggaaatgctgccgggagcctattgtgtaaatgtaggtattttgtaaaataaccttgaaattgtaaattgacacgtgtttggtcagattgtgtcaagtttaatttgttttgttttcttttttcttttttttatttgaaaactactttagcaataattaattccatgattatcacattctgccattaagggatattagtaccgtaatactgaagaaattttattaagtctgaacttctggggtaggcagcttctttgtttcttttctatccacccttgtcggttgaggtatttgtttcttgactaataaaccctttgatacttttagccagaaatcagtctcataaagctatttttgagtatagtttgtgtaaaataaaaatgtttagctttggtaataacttccaagctgaactccctctagcaagatatttttcagtgcttttatttactatgcacttagactatgcactttttctgaaatatttttgtaacacttttttgtatttttgccatttgaaaaggttgtggtgtagttggtctgtaattaagttgcagatttaaaactgctgttagctttgtaaatcaaaatataggtgttttttgtcctggtatatcgtcattccatctgcagctggagctggaatcccattgatcttctagctaccattcattttcttcactgttcacaaaagaagagtgtgaaattcagtgaatgctgttactaatcctgttacgagatgaatctcatttcaccaaaattaaattatgtttttccgctaaaatgatgatacaagttgaagacacatcactctgaaattggaagacctcaccacttaaggctccacagtggcttactcagctgaactctaggttactactctttactttgttcacccattggggggtgcagtttttttaaaatgttgggagatggccattctaactactgttgaatgtctctgttttgggaaggtataacaagaaataaaaaagaatatatatgaagggagagactggttatctcctcccaaaaaaaaaaaaaaaaaaaaaaaaaaaaaagcggccgctcgaattaagcc

SEQ ID NO: 269 - DNA, 764 bp, Homo sapiens
  misc feature (625): n equals a,t,g, or c
  misc feature (739): n equals a,t,g, or c
  misc feature (747): n equals a,t,g, or c
gagctgctgcggatgagagcctctgmtgccggcggggacccagcgcgtgtgtctggttyaccctgacgtcaagtggggcccggggaagtcgcagatgactcgagccgagtggcaggtggcggaggccaagacgctggtgcacacgctggacggctggtccgtggtgcagacaatggtcgtgtccaccaaaacgccggacaggaagctcatctttggcaaagggaactttgagcacctgacagaaaagatccgagggtctccagacgtcacgtgcgtcttcctgaacgtggagaggatggctgccccgaccaagaaagaactggaagccgcctggggcktggaggtgtttgaccgcttcacggtcgtcctgcacatcttccgctgtaacgcccgcacgaaggaggcccggcttcaggtggccctggcggagatgccgctgcacaggtcgaacttgaaaagggacgtcgcccacctgtaccgaggagtcggctcgcgctacatcatggggtcaggagaatccttcatgcagctgcagcagcgtctcctgagagagaaggaggcyaagatcaggaaggccttggacaggcttcgcaagaagaggcacctgctccgccggcagcgacgnaggcgggagttccccgtgatytccgtggtggggtacaccaacttgcggaaagaccacgtgatcaaggattgacggggcgatgccgccattccagccacgggaccagctgttttnccacgttnggaacgttcacgggccc

SEQ ID NO: 270 - DNA, 532 bp, Homo sapiens
  misc feature (467): n equals a,t,g, or c
  misc feature (513): n equals a,t,g, or c
ggcagagcccccacctgccagagctgatcctccctaggccctgcctaaccttgagttggcccccaatccctctggctgcagaagtccccttacccccaatgagaggaggggcaggaccagatcttttgagagctgagggttgagggcattgagccaacacacagatttgtcgcctctgtccccgaagacacctgcaccctccatgcggrccaagatggggaatggaactgaggaagattataactttgtcttcaagggtactatcgtggtgcagtgggggccctcctggtgtttgacctaaccaagcaccagacctatgctgtggtggagcgatggctgaaggagctctatgaccatgytgaagccacgatcgtcgtcatgctcgtgggtaacaaaatgacctyagccaggcccgggaagtgcccatgaggaggcccgaatttcgttgaaaacaatggatgttttcntgagactcagcctggatttaccatgttgagtagctttgagatttcngaagaaattttgcgagttt

SEQ ID NO: 271 - DNA, 1397 bp, Homo sapiens
  misc feature (1): n equals a,t,g, or c
  misc feature (109): n equals a,t,g, or c
  misc feature (1242): n equals a,t,g, or c
  misc feature (1378): n equals a,t,g, or c
naaaccgagttattcatcgagacctcaagctgggcaaccttttcctgaatgaagatctggaggtgaaaataggggattttggactggcaaccaaagtcgaatatgacgnggagaggaagaagacccatgtgtgggactcctaattacatagctcccgaggtgctgagcaagaaagggcacagtttcgaggtggatgtgtggtccattgggtgtatcatgtataccttgttagtgggcaaaccaccttttgagacttcttgcctaaaagagacctacctccggatcaagaagaatgaatacagtattcccaagcacatcaaccccgtggccgcctccctcatccagaagatgcttcagacagatcccactgcccgcccaaccattaacgagctgcttaatgacgagttctttacttctggctatatccctgcccgtctccccatcacctgcctgaccattccaccaaggttttcgattgctcccagcagcctggaccccagcaaccggaagcccctcacagtcctcaataaaggcttggagaaccccctgcctgagcgtccccgggaaaaagaagaaccagtggttcgagagacaggtgaggtggtcgactgccacctcagtgacatgctgcagcagctgcacagtgtcaatgcctccaagccctcggagcgtgggctggtcaggcaagaggaggctgaggatcctgcctgcatccccatcttctgggtcagcaagtgggtggactattcggacaagtacggccttgggtatcagctctgtgataacagcgtggggggtgctcttcaatgactcaacacgcctcatcctctacaatgatggtgacagcctgcagtacatagagcgtgacggcactgagtcctacctcaccgtgagttcccatcccaactccttgatgaagaagatcaccctccttaaatatttccgcaattacatgagcgagcacttgctgaaggcaggtgccaacatcacgccgcgcgaaggtgatgagctcgcccggctgccctacctacggacctggttccgcacccgcagcgccatcatcctgcacctcagcaacggcagcgtgcagatcaacttcttccaggatcacaccaagctcatcttgtgcccactgatggcagccgtgacctacatcgacgagaagcgggacttccgcacataccgcctgagtctcctggaggagtacggctgctgcaaggagctggccagccggctccgctnacgcccgcactatggtggacaagctgcttgagctcacgctcggccagcaaccgtyttaaggcctcctaattagttgsccttcccttccggaattggtggccttcttcatttcccaattggcattttggggggcccnaattggtttgggttcccgg

SEQ ID NO: 272 - DNA, 527 bp, Homo sapiens
  misc feature (413): n equals a,t,g, or c
  misc feature (501): n equals a,t,g, or c
  misc feature (507): n equals a,t,g, or c
ggttgagctgctgccgccgccgcctctgtcgtcgtcgcgagtgtggagtcgggactggagctgctgccgcggcgacgccggggatctttgtcgctagctcccggcccttctgccccgccgccttccctcagtcagcgttgcccactcctctccggccgggcgcccctgcctccatttctcgctctctgtccaccacacacacggcccccccgatcatggatccgggcagtggcggcggcggcggcggcggcggcggcggcgggagcagcagcggcagcagcagcagcgactcggcgcctgactgctgggaccaggcggacatggaagcccccgggccgggcccttgcggcggmggcggctccctggcggcggcggccgaggcccagcgggagaacctcagcgcggccttcagncggcaactcaacgtcaacgccaagcccttcgtgcccaacgtccacgccgccgagttcgtgccgtccttcctgcggggcccggcagcgncgscanccccagctggcgggggccgc

SEQ ID NO: 273 - DNA, 805 bp, Homo sapiens
  misc feature (5): n equals a,t,g, or c
  misc feature (792): n equals a,t,g, or c
  misc feature (794): n equals a,t,g, or c
attgnggtcagagctaaactccttcctggcctgagagtcagctctctgccctgtgtacttcccgggccagggctgcccctaatctctgtaggaaccgtggtatgtctgccatgttgcccctttctcttttcccctttcctgtcccaccatacgagcacctccagcctgaacagaagctcttactctttcctatttcagtgttacctgtgtgcttggtctgtttgactttacgcccatctcaggacacttccgtagactgtttaggttcccctgtcaaatatcagttacccactcggtcccagttttgttgccccagaaagggatgttattatccttgggggctcccagggcaagggttaaggcctgaatcatgagcctgctggaagcccagcccctactgctgtgaaccctggggcctgactgctcagaacttgctgctgtcttgttgcggatggatggaaggttggatggatgggtggatggccgtggatggccgtggatgcgcagtgccttgcatacccaaaccaggtgggagcgttttgttgagcatgacagcctgcagcaggaatatatgtgtgcctatttgtgtggacaaaaatatttacacttagggtttggagctattcaagaggaaatgtcacagaagcasctaaaccaaggactgagcaccctctggattctgaatctcaagatgggggcagggctgtgcttgaaggccctgctgagtcatctgttagggccttggttcaataaagcactgagcaagttgaraaaaaaaaaaaaaaaaaaaananaaaaaaaaagg

SEQ ID NO: 274 - DNA, 1953 bp, Homo sapiens
  misc feature (196): n equals a,t,g, or c
  misc feature (522): n equals a,t,g, or c
  misc feature (524): n equals a,t,g, or c
gcactacaacaagcgctccaccatcacatcccgcgagatccagacggccgtgcgcctgctgctgcccggcgagctggccaagcacgccgtgtccgagggcaccaaggcggtcacccaagtacacccagctccaaagttkgaactgccgggacctggcgctcgctcgctcgagtcgccggctgcttgactccaaaangctcttttcagagccacccacctaatcactagaaaagagcttgttcacttattcccttagtttcttttcataaagtaagttattttagtgtgaaggtcatgggaaatggcatacgtagctttttaactatttggaactcgaggtccccagtgcgtcattggatttgcttttgaatctagagcgtgtctttactcattgtgctgcttagccttcccaggagtcggttctcaattaggctgttgggaatccgcctctttacccgcccccactcccgccccacacgcgccctggtggctccttgggtctgtttcattctaaaacgaagngnctgagttcggctgtcatttaagagaactccaggacacaattcagcccgggttccgcaaacactgcgtgacagctctgtatgactgacgcttggcagcagcttttgtgtccggtcaccagttctgccgtgcgatggggcctcctgtggataccagccgttctgtgtattttggacgaaggccgcgcagcgggtcccagccttgtcctgattgggcgacaagaatattcaaaattctgcgcctttttctaatttgtagatttcagtttccgtcgttcactttgagactttgaaattcctatttctcattttgttgataatttctgcatttaatggtctgtgctttaaatggtaacgctacggccccaggtcactgcgaggcacttaccatgtagatacgggctcaaaagtcacctctcagagacctacgtcatccactcaggaattcgcgcctctcatacttgcctgtctcattttatcttccttctagcagctgtctgaaattggttcgtctgttttcttgtttatggtattctcaagcccttgacagaccggctagtgtggttttcccgtgcatcttcagcctggcacattatggacacttaaatactacgtattgatctaatattgttgggttaatttttccatcccacccttttcttaatcgcttccgtggatggatgaagggtgctgttcatttccattagatgtatgtgaaggcacagtgaaaatggaaatgttcttggagctacttcctcaaaatgtatccttagtcacctcagtgcaacagctgggagggggccgtgttaagattttttttgctacaaagaggaggtggcaatggtagatccacccttatgcttctcagtttagcataacctcttatggattttcatcaaattcagcgtgttggtcactggaaagagccttttccttctccttttcttactctcccctcatggtgttcccctcttaaaggagaggagcttttaatttacacttaccacctcatttgcttttctggaggccatgcaatataggcgggactacagagttaatctcctttttacaaatgaggccaagagaagcctcattggttcacagtcatgcagctcatactgtccacccttgtattctcagatgcaggacaattgcattttagttttattttgtggaggtgcagaatatttactctttctgtccaacccttgattctgccgaggaagacactgatggtttgatgagtgattcagctgtttttggctaagggcttttggagctgatggcaggggtttgatgaatccaaatgagctctagacattatcacagactgaatagatcttaactgtctcctacatgtgtgttttcaaatgtgtatagatgctattgttattaataaagttaccaattaatttaaaaaaaaaaaaaaaaa

SEQ ID NO: 275 - DNA, 2376 bp, Homo sapiens
  misc feature (86): n equals a,t,g, or c
  misc feature (275): n equals a,t,g, or c
  misc feature (1965): n equals a,t,g, or c
ttgatctgtcaaattccaggtgacaagatctatgcaccccatgcgtccttgaggggcctcttccccgcagctctggctggccgcanggcttctggtgtgaaaggttatactgccttttctttgtttgtttgtttttttctctaaaaacaaacagcaaaagacagctgaaaacaagaacttcaccggtgggcaggcaagaattctcttctggaaaatgacgtttgtggctctttcccaagttggccttcaaagaagcctgcctgctgttgagccangaagatgtctcgtgtgaaggctggggtggcggctgtcttggaacctctgtgagcaggaggcctaagcgcagcagtggatagaggtgcagctctctgcctctctgccctttggtctrtgttcacaggtgacccgtgtcagcctgcatcgcaagcacacaccctgcgggccttcaagtctcactgttccgtatgaggaaacagacagcggactgaggaagcgatggccccagagaaagggcccctgtagcctggctctcacacagtattttatctttgattctgaataaatattttttgtggggtttttttttttttttggkggcagttgtttgttttaaactgaccacttggaagaaacaccttggttatctgtggttttcatgccttgtccctgcctctacccccaccccttttgagtcgggtgactcatttttctgtgtagagactcggtggcccaggcaggaggtgaaagcagccatccggaaggccctggggacccttgtgcctgttgctcgccttcaggtcaccagctgagctgcgataggaaaatctgaatggaggcagcaaacagccaaaacaaacattccccacccggccctgtgcatatgaagtctttcttcccccaactcttgaacgatgatgatattcagacgaagcattgatgttatggaagaaagaaagaaacaaacaaaaaatatatatatatgtccaaaaacagacaaatccaagggtgtgaggtaaacgagtgtctgcatttagattccacaaaaccaaaatccatgttgaacaaagttaagtccgtacacagtgactttttgggtgagccgtgtgtgtctgtctgttgtgtgtgtgcctcaagccctgttttcctgtgaagatactttgagtggcagccattctctccacgtgaaccacacgtctggagcacagacaggcctctcaaggtcattgatcttacgcatttactgtttaccgaacaaatgtctgactgtgtactcgggtgtactccgcagcattgtcgactgcagtcccctgtgtttgccagagatactgtgctcgaagtagaggttttactctactcatcactgcgatttgcacattgctccgtggacactcggaggcctgcgttctgttccctataaatggaagcgtgctctgagcctgtctgcctccctcggctgctgctggtcctcagtaccagcgcccgggggtgtccacaaccacttgggacagaagaaggtggaatttcagacagaagcttgactgggtcttcaatgacaggcttggactagctgtggcccagacatcggccctgcccagaattgccaggaggaggctttgcaggctctagaggagccgcagggcctgcctgcctctggtgagtccaacaggcacaagcaagctggcgtgtggccagaggtagccggagtgtgtcacagcccctcagatgcctttccttccacctttttttattttttaagaatcccaaataactcactgaagtgtctcaaaggcgaacaagttttaccaaaatgaatcctttttcagttaacagatcaaatggatgagttctgagcctctcaagttcctttccccagttagagtggggaactgggcaagtgttaactgtgggactcactgcagcgtcctatcctaaaggcacgagaagacggaaatgcaacctgcgganctgggcttggttcccaggtcacagtttggcccccgctacaggatgctgccctgctcagagagagatttaatagggagctgaaggaatcgttagggggccagggagatgtgactgaggctggctttccacgtgaatgagacggggtcggtggagggtttggtgctacagccagtcagaagatttgcaaatgcgaacacattcctgtgtgaggcacgttaccctttgtcagttattgtgaatatgtgtattttaagcaataagattcagctggtcagacttttctgggcagtctcagtgacgcatttcctgtgctgtgattgttctgaagacagagtggctctaaccactgtgagaagcccaaataaaaattgatcccaaaaaaaaaaaaaaaaaaaaaaactcgaggggggg

SEQ ID NO: 276 - DNA, 2439 bp, Homo sapiens
gggcacgaggtccggggggcgctgacagctccaagccgaggattctgctcatgggactccggcgcagcggcaagtcctccatccagaaggtggtgtttcataagatgtcacccaacgagaccctctttttggaaagtaccaacaagatttataaggatgacatttccaatagctcctttgtgaatttccagatatgggattttcctgggcaaatggacttttttgacccaacctttgactatgagatgatcttcaggggaacaggagcattgatatacgtcattgacgcacaggatgactacatggaggctttaacaagacttcacattactgtttctaaagcctacaaagttaacccagacatgaattttgaggtttttattcacaaagttgatggtctgtctgatgatcacaaaatagaaacacagagggacattcatcaaagggccaatgatgaccttgcagatgctgggctagaaaaactccatcttagcttttatctgactagtatctatgaccattcaatatttgaagcctttagtaaggtggtgcagaaactcattccacaactgccgaccttggaaaacctattaaatatctttatatcaaattcaggtattgaaaaagcttttctctttgatgttgtcagcaaaatctacattgcaacagacagttcccctgtggatatgcaatcttatgaactttgctgtgacatgatcgatgttgtaattgatgtgtcttgtatatatgggttaaaggaagatggaagtggaagtgcttatgacaaagaatctatggcaattatcaagctgaataatacaactgtcctttatttaaaggaggtgactaaatttttggcactggtctgcattctaagggaagaaagctttgaaagaaaaggtttaatagactacaacttccactgtttccgaaaagctattcatgaggtttttgaggtgggtgtgacttctcacaggagctgtggtcaccagactagtgcctccagtctgaaagcgctgacacacaatggcacgccacgaaacgccatctagtctgaatcccagcgtcggggctctgtgccagcttactcttcactccagggtcggatgccacgtgctacaggacatgggagctgctgcttgtgggaatctggtgcctgttccactagagacaaggggtagagtttctcatttggatgaaaaccccttcaactggtggtgtacaactgaagctactatatcttttttgaaaatggcaaaaaaaaaaaaaaaaaaattctggagaccacagaactcaagtgtgtgtttctcctcttttgggtcccctttaagtagttgggatattttggacctggagataacaccagttacccatccttaccagggaatgttgccatcaattccagttgaaaataatagaaaagactgaatttttatatgcttcacttaggctttcatttgagtagactctaaaaattctgccttgcttaagttctaacactgcctctcagatttcagttttggacattgcacaactaagaccttttaaacgcatttgcttgctaactcggaagacacatagtctgcagcaagacattcctatattgaagaaatgagagaaaattttatgctgcatcaggtggagagcaaggctcaacggtggttgcattagttccctcggaagtattgaaaaaactttgaaatggaagaaaatttttgcacctatgttctgagtaccagatgtctgggttctttcttctgcattagataaatgatcatgctcagtgtaacaaagggaattaaaagttttcccacagtccccttctagggaggaaactcattgtgtcactgaaatgtttagcttactttaatcttgatatcagcctctacagaccttttattctaagctatcgagcttcttgattgcatttggttgaccacgagtgaccctaaggcattgggggactgtccactgggagttggagtgagcacgtggtgctgcaacaggcattgttttacatactttgtctccagtattctgacaccaagtgtcaactgtggtactttctttgcctaggatatgaattcataattgttgcttttgttgatggttgataccctttccattgatttaaacctaacacattatttctattccacatgcccagtagacatatattccaaagccactggaccacttgagtacataagtgccactgtttaatgcaatatgtatattcaggtctgtaaagctaacagtgtgacttggagtgcttcctgcagatgattctgacttgagtatttacatggaccatggtgatatccaaaagaaaaatgctttttatatttatagattatttcattgaactatatatgaaatgggtatcaataaatgtatttactccaaaaaaaaaaaaaaaaaaaaaaaaaaaaaaaaaag

SEQ ID NO: 277 - DNA, 1889 bp, Homo sapiens
  misc feature (1076): n equals a,t,g, or c
ccagggccggggtgccctccctcccaccttctcccgccatgagccagggaagtccgggggactgggacccccctagatcccacccccggacccccagcatcccccaaccccttcgtgcatgagttacatctctctcgcctccagagggttaagttctgcctcctgggggcattgctggcccccatccgagtgcttctggcctttatcgtcctctttctcctctggccctttgcctggcttcaagtggccggtcttagtgaggagcagcttcaggagccaattacaggatggaggaagactgtgtgccacaacggggtgctaggcctgagccgcctgctgtttttcctgctgggcttcctccggattcgcgttcgtggccagcgagcctctcgccttcaagcccctgtccttgttgctgccccacactccactttctttgaccccattgttctgctgccctgtgacctgcccaaagttgtgtcccgagctgagaacctttccgttcctgtcattggagcccttcttcgattcaaccaagccatcctggtatcccggcatgacccggcttctcgacgcagagtggtggaggaggtccgaagcgggccacctcaggaggcaagtggccgcagtgctattctttcctgagggcacctgttccaacaagaaggctttgcttaagttcaaaccaggagccttcatcgcaggggtgcctgtgcagcctgtcctcatccgctaccccaacagtctggacaccaccagctgggcatggaggggtcctggagtactcaaagtcctctggctcacagcctctcagccctgcagcattgtggatgtggagttccttcctgtgtatcaccccagccctgaggagagcagggaccccaccctctatgccaacaatgttcagagggtcatggcacaggctctgggcattccagccaccgaatgtgagtttgtagggagcttacctgtgattgtggtgggccggctgaaggtggcgttggaaccacagctctgggaactgggaaaagtgcttcggaaggctgggctgtccgctggctatgtggacgctgggncagagccaggccggagtcgaatgatcagccaggaagagtttgccaggcagctacagctctctgatcctcagacggtggctggtgcctttggctacttccagcaggataccaagggtttggtggacttccgagatgtggcccttgcactagcagytctggatgggggcargagcctggaagagctaactcgtctggcctttgagctctttgctgaagagcaagcagagggtcccaaccgcctgctgtacaaagacggcttcagcaccatcctgcacctgctgctgggttcaccccaccctgctgccacagctttgcatgctgagctgtgccaggcaggatccagccaaggcctctccctctgtcagttccagaacttctccctccatgacccactctatgggaaactcttcagcacctacctgcgccccccacacacctctcgaggcacctcccagacaccaaatgcctcatccccaggcaaccccactgctctggccaatgggactggcaagcacccaagcagaagggagactgagtgcctcagcctctcaccccctcctcctcagggcagcgctaggggcctcccctatgcctcagccccatctctgctcctgtttgaattttgttattgttgtttggttgttgtttttttaagttgattttaattttttgtttggttgatttttttgtaaaaaactattttatatataaatataaatctatatctatatctattaaaaaaaatgaagtccagtcatattgatgttaccattaattggggagggaaggggtgaatggttgtaggacggccgt

SEQ ID NO: 278 - DNA, 636 bp, Homo sapiens
  misc feature (608): n equals a,t,g, or c
  misc feature (632): n equals a,t,g, or c
agggaaagtccgttcccactgccctcggggagagaagaaaggagggggcaagggaagaagctgctggtcrgactcacaatgaaaacgctccttcttttgctgctggtgctcctggagctgggagaggcccaaggatcccttcacagggtgcccctcaggaggcatccgtccctcaagaagaagctgcgggcacggagccagctctctgagttctggaaatcccataatttggacatgatccagttcaccgagtcctgctcaatggaccagagtgccaaggaacccctcatcaactacttggatatggaatacttcggcactatctccattggctccccaccacagaacttcactgtcatcttcgacactggctcctccaacctctgggtcccctctgtgtactgcactagcccagcctgcaagacgcacagcaggttccagccttcccagtccagcacatacagccagccaggtcaatctttctccattcagtatggaaccgggagcttgtccgggatcattgggagccgaccaagtctctgtgggaaggactaaccgtggttgggccagcagtttgggaggaaagtgttcacagagccagggccagnacttttgtgggatgcaggagtttngatg

SEQ ID NO: 279 - DNA, 2861 bp, Homo sapiens
  misc feature (2861): n equals a,t,g, or c
ggcacarccacagcttctccagtggctatgtggagatggagtttgagtttgaccggctgagggccttccaggctatgcaggtccactgtaacaacatgcacacgctgggagcccgtctgcctggcggggtggaatgtcgcttccggcgtggccctgccatggcctgggagggggagcccatgcgccacaacctagggggcaacctgggggaccccagagcccgggctgtctcagtgccccttggcggccgtgtggctcgctttctgcagtgccgcttcctctttgcggggccctggttactcttcagcgaaatctccttcatctctgatgtggtgaacaattcctctccggcactgggaggcaccttcccgccagccccctggtggccgcctggcccacctcccaccaacttcagcagcttggagctggagcccagaggccagcagcccgtggccaaggccgaggggagcccgaccgccatcctcatcggctgcctggtggccatcatcctgctcctgctgctcatcattgccctcatgctctggcggctgcactggcgcaggytcctcagcaaggytgaacggagggtgttggaagaggagctgacggttcacctctctgtccctggggacactatcctcatcaacaaccgcccaggtcctagagagccacccccgtaccaggagccccggcctcgtgggaatccgccccactcygctccctgtgtccccaatggctctgcgttgctgctctccaatccagcctaccgcctccttctggccacttacgcccgtccccctcgaggcccgggcccccccacacccgcctgggccaaacccaccaacacccaggcctacagtggggactatatggagcctgagaagccaggcgccccgcttctgcccccacctccccagaacagcgtcccccattatgccgaggctgacattgttaccctgcagggcgtcaccgggggcaacacctatgctgtgcctgcactgcccccaggggcagtcggggatgggccccccagagtggatttccctcgatctcgactccgcttcaaggagaagcttggcgagggccagtttggggaggtgcacctgtgtgaggtcgacagccctcaagatctggtcagtcttgatttcccccttaatgtgcgtaagggacaccctttgctggtagctgtcaagatcttacggccagatgccaccaagaatgccaggaatgatttcctgaaagaggtgaagatcatgtcgaggctcaaggacccaaacatcattcggctgctgggcgtgtgtgtgcaggacgaccccctctgcatgattactgactacatggagaacggcgacctcaaccagttcctcagtgcccaccagctggaggacaaggcagccgagggggcccctggggacgggcaggctgcgcaggggcccaccatcagctacccaatgctgctgcatgtggcagcccagatcgcctccggcatgcgctatctggccacactcaactttgtacatcgggacctggccacgcggaactgcctagttggggaaaatttcaccatcaaaatcgcagactttggcatgagccggaacctctatgctggggactattaccgtgtgcagggccgggcagtgctgcccatccgctggatggcctgggagtgcatcctcatggggaagttcacgactgcgagtgacgtgtgggcctttggtgtgaccctgtgggaggtgctgatgctctgtagggcccagccctttgggcagctcaccgacgagcaggtcatcgagaacgcgggggagttcttccgggaccagggccggcaggtgtacctgtcccggccgcctgcctgcccgcaggcytatatgagctgatgcttcggtgctggagccgggagtctgagcagcgaccacccttttcccagctgcatcggttcctggcagaggatgcactcaacacggtgtgaatcacacatccagctgcccctccctcagggagcgatccaggggaagccagtgacactaaaacaagaggacacaatggcacctctgcccttcccctcccgacagcccatcacctctaatagaggcagtgagactgcaggtgggctgggcccacccagggagctgatgccccttctccccttcctggacacactctcatgtccccttcctgttcttccttcctagaagcccctgtcgcccacccagctggtcctgtggatgggatcctctccaccctcctctagccatcccttggggaagggtggggagaaatataggatagacactggacatggcccattggagcacctgggccccactggacaacactgattcctggagaggtggctgcgcccccagcttctctctccctgtcacacactggaccccactggctgagaatctgggggtgaggaggacaagaaggagaggaaaatgtttccttgtgcctgctcctgtacttgtcctcagcttgggcttcttcctcctccatcacctgaaacactggacctgggggtagccccgccccagccctcagtcacccccacttcccacttgcagtcttgtagctagaacttctctaagcctatacgtttctgtggagtaaatattgggattggggggaaagagggagcaacggcccatagccttggggttggacatctctagtgtagctgccacattgatttttctataatcacttggggtttgtacatttttggggggagagacacagatttttacactaatatatggacctagcttgaggcaattttaatcccctgcactaggcaggtaataataaaggttgagttttccacaaaaaaaaaaaaaaaaaaaaaaaaaaaaaaaaan

SEQ ID NO: 280 - DNA, 1506 bp, Homo sapiens
aattcggcacgagctggtgcagcatgatgctgcccccttggaccctcggccttctcctgctggccacagtcagaggaaaagaggtctgctacggacaacttggctgcttttctgatgaaaaaccatgggcaggaacccttcagcgacctgtaaaattacttccctggtcccccgaggacattgacacccgctttcttctgtacacaaatgaaaatccaaacaacttccaactaatcactggcacggaaccagacaccattgaggcttcaaacttccaactggaccgcaagacacgcttcatcatccatggcttcttagacaaggcggaggacagctggccatcggacatgtgcaagaaaatgtttgaagtggagaaggtgaactgcatctgtgtggactggaggcacgggtcccgggcaatgtacacccaagccgtgcaaaacattcgggttgttggggcggagacagctttcttaatacaagcactgtcgacgcagctggggtacagccttgaggacgtgcatgtcatcggccacagcctgggcgcgcacacggccgcggaggcgggcaggaggctggggggccgcgtgggcaggatcacagggctggatccagcagggccgtgcttccaggatgaacctgaggaggttcggttggatccatctgacgccgtgtttgtggatgtgattcacacagattcttctcccatagttccttccctaggtttcggaatgagccaaaaggtgggccatctggatttctttccaaatggaggaaaggaaatgcccggatgtaagaaaaatgtcctttcaaccattactgatattgatggaatatgggaaggaattggtggctttgtgtcttgcaatcacctaagaagcttcgagtattactcaagcagcgtcctcaaccctgatggcttcctgggctatccctgtgcctcctacgatgagtttcaggagagtaagtgtttcccttgtccagctgaaggatgccccaaaatggggcactatgctgaccaatttaaggggaaaacaagtgctgtggaacaaacctttttcctgaacacaggagagagtggtaactttactagttggagatataaggtatcagtcacactttctggaaaagagaaagtgaatgggtacatcaggattgctttgtatggaagtaatgaaaactcgaaacaatatgagattttcaaaggatccctcaaaccagatgcaagtcacacgtgtgctattgatgtggattttaatgttggaaaaatacagaaagttaaattcctctggaacaaacgtgggataaatctatctgagcccaaactgggggcttcccaaatcacagtgcaaagtggtgaagatgggactgagtataatttttgtagcagcgacactgtggaagaaaacgtcttgcaatctctttacccttgttaaaaacgtggtgcggctattgcggtaataaaatctttaatgcactcggaaaaaaaaaaaaaaaaaaaaaaag

SEQ ID NO: 281 - DNA, 1693 bp, Homo sapiens
gacttccggactgctcctggccgcagggggcgccgccgtcgcacagagaggcctgggcggggcggaccggcgctgggcagccaggacagccgcggtagccgggtccgcagggcagcagccggcctctcccactgcagccctcccgcccgcctaccgtccggcgcgatggcggggagtagctcgctggaggcggtgcgcaggaagatccggagcctgcaggagcaggcggacgccgctgaggagcgcgcgggcaccctgcagcgcgagctggaccacgagaggaagctgagggagaccgctgaagccgacgtagcttctctgaacagacgcatccagctggttgaggaagagttggatcgtgcccaggagcgtctggcaacagctttgcagaagctggaggaagctgagaaggcagcagatgagagtgagagaggcatgaaagtcattgagagtcgagcccaaaaagatgaagaaaaaatggaaattcaggagatccaactgaaagaggcmaagcacattgctgaagatgccgaccgcaaatatgaagaggtggcccgtaagctggtcatcattgagagcgacctggaacgtgcagaggagcgggctgagctctcagaaggccaagtccgacagctggaagaacaattaagaataatggatcagaccttgaaagcattaatggctgcagaggataagtactcgcagaaggaagacagatatgaggaagagatcaaggtcctttccgacaagctgaaggaggctgagactcgggctgagtttgcggagaggtcagtaactaaattggagaaaagcattgatgacttagaagagaaagtggctcatgccaaagaagaaaaccttagtatgcatcagatgctggatcagactttactggagttaaacaacatgtgaaaacctccttagctgcgaccacattctttcattttgttttgttttgttttgtttttaaacacctgcttaccccttaaatgcaatttatttacttttaccactgtcacagaaacatccacaagataccagctaggtcagggggtggggaaaacacatacaaaaaggcaagcccatgtcagggcgatcctggttcaaatgtgccatttcccgggttgatgctgccacactttgtagagagtttagcaacacagtgtgcttagtcagcgtaggaatcctcactaaagcaggagaagttccattcaaagtgccaatgatagagtcaacaggaaggttaatgttggaaacacaatcaggtgtggattggtgctactttgaacaaaaggtccccctgtggtcttttgttcaacattgtacaatgtagaactctgtccaacactaatttattttgtcttgagttttactacaagatgagactatggatcccgcatgcctgaattcactaaagccaagggtctgtaagccacgctgctcttcygagacttccattcctttctgattggcacacgtgcagctcatgacaatctgtaggataacaatcagtgtggatttccactcttttcagtccttcatgttaaagatttagacaccacatacaactggtaaaggacgttttcttgagagttttaactatatgtaaacattgtataatgatatggaataaaatgcacattgtaggacattttctaaaaaaaaaaaaaaagggsggccgcyctagrggatt

SEQ ID NO: 282 - DNA, 1223 bp, Homo sapiens
  misc feature (1159): n equals a,t,g, or c
  misc feature (1196): n equals a,t,g, or c
  misc feature (1208): n equals a,t,g, or c
  misc feature (1223): n equals a,t,g, or c
ggcacgmgccgcgcctcccggcgctccctccccgactcctaagtccttcggccgccaccatgtccgcctcggctgtcttcattctggacgttaagggcaagccattgatcagccgcaactacaagggcgatgtggccatgagcaagattgagcacttcatgcctttgctggtacagcgggaggaggaaggcgccctggccccgctgctgagccacggccaggtccacttcctatggatcaaacacagcaacctctacttggtggccaccacatcgaagaatgccaatgcctccctggtgtactccttcctgtataagacaatagaggtattctgcgaatacttcaaggagctggaggaggagagcatccgggacaactttgtcatcgtctacgagttgctggacgagctcatggactttggcttcccgcagascaccgacagcaagatcctgcaggagtacatcactcagcagagcaacaagctggagacgggcaagtcacgggtgccacccactgtcaccaacgctgtgtcctggcgctccgagggtatcaagtataagaagaacgaggtcttcattgatgtcatagagtctgtcaacctgctggtcaatgccaacggcagcgtccttctgagcgaaatcgtcggtaccatcaagctcaaggtgtttctgtcaggaatgccagagctgcggctgggcctcaatgaccgcgtgctcttcgagctcactggccgcagcaagaacaaatcagtagagctggaggatgtaaaattccaccagtgcgtgcggctctctcgctttgacaacgaccgcaccatctccttcatcccgcctgatggtgactttgagctcatgtcataccgcctcagcacccaggtcaagccactgatctggattgagtctgtcattgagaagttctcccacagccgcgtggagatcatggtcaaggccaaggggcagtttaagaaacagtcagtggccaacggtgtggagatatctgtgcctgtacccagcgatgccgamtcccccagawtcaagaccagtgtgggcagcgccaagttatgtgccggagagaaacgtcgtgatttggagtaattaatcttttcccgggggggcaaggagtaattggatgcgagcccatttgggcttccccatgtggnaaaaggaaaagttggaagggcgggcccccatcgggtncaatttgagatnccctatttaacgttn

SEQ ID NO: 283 - DNA, 490 bp, Homo sapiens
  misc feature (57): n equals a,t,g, or c
cggaagtgctgagattacaggtgtgagccactgcacccagcctttgttttatttttnattttttgagaggtatgattctttctagagattttttctcatggctactattagatcaggaatgggtgattggagattattagattctaggttaacttctaccactttaccctaatacataaaactttttcctaaataaatgatggaaggaataatacttggttacctggcattatttttcagtaagaaaaaagctttactaaccactacatttatggaaatttgtaggggtaagtattttataggtcataaaaaacaccataatataacgaatctcattttctttaaatgtgaattaaatcctaacagtcatctttataaaatgaccataggctaaaatcttacgtgtaagtactactacaataaataatttctgaaacctttaaaaaaaaaaaaaaaaaaaaaaaaaaaaaaaaaaaaaaggggggggggc

SEQ ID NO: 284 - DNA, 3009 bp, Homo sapiens
  misc feature (412): n equals a,t,g, or c
  misc feature (548): n equals a,t,g, or c
aaaaaacaaaaaaaaaaccacacacacacataaaaaacccaacaggtcaaaataaaagttgaacttgagttacatttaatttaaatataaatgcattttgagaaatgttaagaacaatttagtcaatcgttcatctgtcattggtactgtaaaataagctgtggtctatttccactgtttaattttctactcagttctaccaaataggatgtcatgtttgacatttttgatagtgactttggggtctkcttcactgaaagcaccttagaactgtactataagaaaacatttcccctatgtataattatatgaatgtgatgtttattgcttattaatttataattcagtcattctctatataggacttcttaaaatttagaagggaaatctagctacttcaaattgtctgttnaaatttattatgcccaaatcaacctctgaaaaaaggtttttccaggaagatttacatttaggtttaatattttttttagttaggtagagttttaaaaaatacttgagcctgtccgtgataaagctataaaattcantaactttttagaatgttaaatgaagacactgtttcctaacatcagtgagatacatctttgaatttaaacattcatatttactgagtacctactaggtaccaagtactcttttaggcactggaaatacagtgatggacaaaacaggtaaaaaatcgctgccccctcagagctgacattctggggtgggaatttcattttgccacgtactaacgttctgcacaaaagacaggctagactcttgtctagattgtttaaaagaaacttttcaaattggttacattaattttagtttattttcacaagtaaaaatggctttttatttagattctttctgtcccaggctgttgatcttaaaactagttgatttaaagagtttttttgcacaacatttcaattatatttgtgaacttagaaattaacttacaatctaaccagccatcatatcatatcctatcaggctagatatctcaatagtagactgaatacaaagctaattttttttacatgtcaatattggcacaaactggaatgaaagaatagtttgattcagacctgctccactatgtgttgctaaaacacatgctatgagcactccaggaaacactatattttttccaaaaaatatgtgattatatatgttaaagtatagataacatttcacacttggatacatatgtgcatttactgtatttcttggtaagcatatttttgggggaaagtgctgctgatatgatacaagtagacaaaatttaaatgaaattttgtcacattctatggaaaatggtttctggtaaactgagaaggrtattaaaataagtggcttttttctgggctaccattattgtttgatttctctttgtcaagtgtatagaacctgtcatacattcatgataagtagcactgaaaaattactcattcaaatttcccctgggcacgtaaggcaaaatattgccggttgggatttcaaggtcagtgacgacgcatttcctcccagtacagaccccccagccccccttgctggacatggggaggcagagagtcacttgaccatccagaaatacatgactacaagtcctttatgactgtttgccattttttttaatggtacttagtattttgatcaaactttagtctccagaactaaacaagtccctaagtttccttattttaatttactgtgactagatttgaagcaaataaatactccagatccatgcagctagaacacacttgcttccactactaaatatacagggtatgtcctaacatggagttaactggaatagcagtacactagcaagtatctgtgraatccttagcactgacgggttaacagaaatgctttggtaatacctacttagttaattggaggaagtagtaaataaacattaggtaatctgcagattacttcaaatgggaaaaatctttttgtagactctatagtaccctctctattcactagcttctgaaaagggaggagtatttttagtttgacaatttaataatttaaaaacaagacatctccaggtaggaaaaaatgaaagctatttcatgcaaacattatctaatttagcttaaaagtgaaagtggtaatactgttggtttctgtaaatgttgcagggttttaaactttataattactttaatatttttgataactagaaatctagtattgccataaaggaaactaagtgcccatcaaagatttgtttggtataaataaagaattatttgttttgttttcaatgacagtaagctacaaatcatgatgcttaaaaactttctaaagatgaattgtgtggcagtgattggtctgtttgtggagaatgtatgaaagctattaatattctagaatagattaataaattggctatgttgttccaatgaatgtacagcacttccattaacttttgaaagcaacacagccttaaactcaatgcttttgctttatgacatgggaatgttctgtcatcaatggagtgtattcttgtaatagaattctttatatcgttctcaattctatagactttcaagcctatgtatgaatatgaaggggttttttttttttgctttgttttctttttagattttgtacattccatctttataggtctgtttcatatgttttatgtatagaacactaagtcttgcactctctgacattgatactgatatattctcgtcatttgttcttttatgaatcaaaatgttgactgcctatttaaagaaaagaatgaacgctgtgcatcaaagtgtttgtatgttcgtagctacatacgtaccacagtattttggatgctttagtctacaatgaaactttcaattaattctgtcttgaaacataggagaaacaggattcatgtgtatctctttaccatgcacaaaatctcaaatcattataataaagcttgttttctccaaaaaaaaaaaaaaaaaaaaaaaactcgagactagttctctc

SEQ ID NO: 285 - DNA, 876 bp, Homo sapiens
  misc feature (740): n equals a,t,g, or c
  misc feature (760): n equals a,t,g, or c
  misc feature (813): n equals a,t,g, or c
ggcggggtggccgggccaggggtgggcagggccctcggctaaacatctgcggcatctgcgggaagagcttcgggcgkggctccaccctgatccagcaccagcgcatccacaccggtgagaagccctacaaatgtgaggtctgcagcaaggccttctcccagagctctgacctcatcaaacaccagcgcacccacactggcgagcggccctacaaatgtccccgttgcggcaaggccttcgccgacagctcttacctgcttcgccaccagcgcactcactctggccagaagccctacaagtgcccacattgtggcaaggccttcggcgacagytcctacctcctgcgacaccagcgcacccacagccacgagcggccctacagctgcaccgagtgcggcaagtgctatagccagaactcgtccctgcgcagcatcagagggtgcacaccggtcagaggcccttcagctgtggcatctgcggcaagagcttctcccagcggtcggcccttatcccccatgcccgcagccacgcccgggagaagcccttcaagtgccctgagtgcggcaagcgctttggccagagctcggtgctggccatccacgcccgcacccacctgccaggycgcacctacagctgccccgactgcggcaagaccttcaatcgctcctccactctcatccagcaccagcgctcccacacgggcgagcgggccctgacaggtggcgccgtgtgcgcagagngggctttctgccgctgcctnccacgctttctggcagcattcaccgggttccacagtgggcggagcgggccttnacaagtggcgatggattgcgggaaaggcctttcttcccagagcttccggaccttcattccggc

SEQ ID NO: 286 - DNA, 861 bp, Homo sapiens
gacacctctgtcaccatgtggttcctggttctgtgcctcgccctgtccctgggggggactggtgctgcgcccccgattcagtcccggattgtgggaggctgggagtgtgagcagcattcccagccctggcaggcggctctgtaccatttcagcactttccagtgtgggggcatcctggtgcaccgccagtgggtgctcacagctgctcattgcatcagcgacaattaccagctctggctgggtcgccacaacttgtttgacgacgaaaacacagcccagtttgttcatgtcagtgagagcttcccacaccctggcttcaacatgagcctcctggagaaccacacccgccaagcagacgaggactacagccacgacctcatgctgctccgcctgacagagcctgctgataccatcacagacgctgtgaaggtcgtggagttgcccacccaggaacccgaagtggggagcacctgtttggcttccggctggggcagcatcgaaccagagaatttctcatttccagatgatctccagtgtgtggacctcaaaatcctgcctaatgatgagtgcraaaaagcccacgtccagaaggtgacagacttcatgctgtgtgtcggacacctggaaggtggcaaagacacctgtgtgggtgattcagggggcccgctgatgtgtgatggtgtgctccaaggtgtcacatcatggggctacgtcccttgtggcacccccaataagccttctgtcgccgtcagagtgctgtcttatgtgaagtggatcgaggacaccatagcggagaactcctgaacgcccagccctgtcccctacccccagtaaaatcaaatgtgcatccaaaaaaaaaaa

SEQ ID NO: 287 - DNA, 1068 bp, Homo sapiens
aattcggcacgaggtcactgctggctgaaggctgcgctcaggcccgtggatctcatcgaagatggcggcgcgatctgtgtcgggcattaccagaagagtcttcatgtggacagtctcagggacaccatgtagagaattttggtctcgattcagaaaagagaaagagccagtggttgttgagacagtagaagagaaaaaggaacctatcctagtgtgtccacctttacgaagccgagcatacacaccacctgaagatctccagagtcgtttggaatcttacgttaaagaagtttttggttcatctcttcctagtaattggcaagacatctccctggaagatagtcgtctaaagttcaatcttctggctcatttagctgatgacttgggtcatgtagtccctaactccagactccaccagatgtgcagggttagagatgttcttgatttctataatgtccctattcaagatagatctaaatttgatgaactcagtgccagtaatctgccccccaatttgaaaatcacttggagttactaagcaattcggaagagaaacacattgaaatcactgtctttccctgagcaagggggctgctcattagatcttttgatactttaccatgtgaaatactaccagaactgttctctaaacccactttttctgtagaggaatgtatcatctttttttttctcatattacaaatggacaaataacggactttctattttcatatttgctgaaaccattttttaaatgaaattaggtcattatttatgaaaagttttgagagggcactgtcaacttgggtttaagacaggaggacattgcaagttcacacctttcataagcataaagtagttgcaagaaagtattttcatcctgttaggattcatatctaagatagagttatgcattgcacatacacaaataaacttttattagatagatacctataaaagaaacataaaagtatgttgtgtattactgacagttctagattaatttcttttagaattaaagtagatttgttaaaaaaaaaaaaaaaaaaaaaaaaaaaaaaaaaaaaa

SEQ ID NO: 288 - DNA, 2256 bp, Homo sapiens
  misc feature (42): n equals a,t,g, or c
tgtgcttggtgaatctacccccaacccaaacccaggctgtcnatcgcccctcaacccttcttccaaactacgtgctgaagccgttcttccccaacctgtttccccccccagagtcctggttcggctcctggctgccaatctgcttattgctcctcacatgggtcaactgttccagtgtgcggtgggccacccgggttcaagacatcttcacagctgggaagctcctggccttggccctgattatcatcatggggattgtacagatatgcaaaggagagtacttctggctggagccaaagaatgcatttgagaatttccaggaacctgacatcggcctcgtcgcactggctttccttcagggctcctttgcctatggaggctggaactttctgaattacgtgactgaggagcttgttgatccctacaagaaccttcccagagccatcttcatctccatcccactggtcacatttgtgtatgtctttgccaatgtcgcttatgtcactgcaatgtccccccaggagctgctggcatcmaacgccgtcgctgtgacttttggagagaagctcctaggagtcatggcctggatcatgcccatttctgttgccctgtccacatttggaggagttaatgggtctctcttcacctcctctcggctgttcttcgctggagcccgagagggccaccttcccagtgtgttggccatgatccacgtgaagcgctgcaccccaatcccagccctgctcttcacatgcatctccaccctgctgatgctggtcaccagcgacatgtacacactcatcaactacgtgggcttcatcaactacctcttctatggggtcacggttgctggacagatagtccttcgctggaagaagcctgatatcccccgccccatcaagatcaacctgctgttccccatcatctacttgctgttctgggccttcctgctggtcttcagcctgtggtcagagccggtggtgtgtggcattggcctggccatcatgctgacaggagtgcctgtctatttcctgggtgtttactggcaacacaagcccaagtgtttcagtgacttcattgagctgctaaccctggtgagccagaagatgtgtgtggtcgtgtaccccgaggtggagcggggctcagggacagaggaggctaatgaggacatggaggagcagcagcagcccatgtaccaacccactcccacgaaggacaaggacgtggcggggcagccccagccctgaggaccaccattccctggctactctctccttcctcccccttttatcctacctccctgccttggtcccgccaacacatgcgagtacacacacacccctctctctgcttttgtcaggcagtggtaggactttggtgtgggtggtgagaaattgtaaacaaaaactgacattcatacccaaagaaccagcctctcaccccagggtccatgtcccaggccccactccagtgctgcccacactcccagctgctggaggagaggggagatgccaaggtgccctgcaggacctccctccgggccacaccctcagctgcctcttcaggaaccggagctcattactgccttccctcccagggaggccccttcagagaggagaggccacaggagctgcattgtggggggacaggctcaagcaattctgtccccatcaaggggtcagctggagagacccaagaccctatctgttcaccagggacccaaaatccaaggggatgcttccctctgccctctttcctgcccctccccatcatacctgcacccaccccagccagggctccctgtccagaattcggttctcctcaggacgccaactcccagagctaaggaccaaggagaagaacagcctctccacccccaagccaggcggttgaggaacatattgagaaaggttcagattgcagaaacccagccctgcccctgcctcctgcatccagcccccaacatggtgccaaagcttccagaagccaaaaagcttctgatttttaaggtagtgggcatctctctcctaatgacgaagctgctcagcaactccacctgcccgccgcaggaaggagcagtcccctgctatccctgcagccactcccagcacacccgcacacagccagcaccaccgtccccaccgtgcacttctyctctctgggccttggtttggggaccagggtacggagggattccccaaggcctttcagggcttgaggttcagaggccagattcagctttaaggttaacttcca

SEQ ID NO: 289 - DNA, 331 bp, Homo sapiens
  misc feature (273): n equals a,t,g, or c
  misc feature (279): n equals a,t,g, or c
agtatctatcccaaggattttagcatttatcccaagagcatttatccaagagcatttatcccaaaagtatttatcccgatgattttagcatttatccgaagagtatttatcccaaggatagcatttatcccaagagcatttacccaagagcatttttcccaagactatttatcccaaagattttagcatttatcccaagagcatttacccaagagcatttatcccaaggaattttgttttgttttgttttgtttttttgagacagagtctttntctgtnacccaggctggagtgagccgagatcgtgcccactgcacttccagtctgggcg

SEQ ID NO: 290 - DNA, 705 bp, Homo sapiens
aatatcaccaaactgattgtaaatgtgcggctgtagcagacattttagtgtggtggtgtgcagccatttcggccctacacctgccagcctggctaccttacagttgtgttccgatttttgcgtctatgcttggtgtgcctcacttgctgcattttccagcatgcaaccaggagttgacgtaggaaaaagggatgctttcttactttggaagctctcagggaagttggtgtcaatttctcctccactgcctggcctaccctgcactcccaaagattttgtgcagatgggtagttccattttttaaaaattgtgcagatatggaaaattgtgacttacttcatgaccagaactatctagaatatgtgtgggggtataaacatcttgcttaaccaaatatctatgtaggcagaggtaaccaggagagaagcaagacttgctgcctaaaggagcccaccattttacttttcacatttaatctgccacgttgaatcaattggaataaaacctgactcgcaggtgactggacaggaaatcccaaagttccaccatttctatgcttaattttaacgtccccccgcttttttttttgtagaaaataaaaacaagaaaatcgttccaatgtaagatgtttgttatagaaactttaggcaatacaggtgtgtaataaaatgtttaataaacttctaaacacttttgtatttggat

SEQ ID NO: 291 - DNA, 952 bp, Homo sapiens
  misc feature (827): n equals a,t,g, or c
  misc feature (943): n equals a,t,g, or c
  misc feature (948): n equals a,t,g, or c
aaggctaatgaaattgcattccaggtaggggttaacgtcaaatttccatggctggtagctgtgcttttggcatatcacagtgttgtgtcactactacaaggtaaagcatctacagcggagaatgagcttgaaaatgagagacctattgwgaataaatatgcccatgagagcatatttaataagcctctataacatgcagccaaaccagacattcactcctgcagagaaatgttgccctggagaaaaagaaatatataaagataggctatcacccttcttttgctgcagtactaagcatagcaagaaattagaatcatttacattggaaatttgaaaattccctttatatacacaactttactgtgtataaataaaaaatatttattaatgcagtgatgtccgtcagttgttttaggaatggcttctgcaattagaaaaatagcttgctagaatgtaaatgttctgttactggtaaatgtactgcacacattcattggacgttaaaacaagtgagtagccttttttacctgccagcagcatggctgtgtgcagccactaggctgaggacaataaattaccaaaaattataatgtaccgagctgaaaatgctcagtacattatgtggcatattctggatgtgatgagaaatctcattgccatttgggacactgacatcccagaagtaatccacaactgctttgcaaaagcaaagtgactgctcagatgaacagagcagagtactcactcactatggtggcatcagctgcaaagcgaaaatgaactgtcccatgatcatgttgatggttttctagatactgccaacatgnttaggctcttttctggatgctgatggagttttcaaacacggaacagacacccttgatgtggggttttgctaaggaacatrggaggaacgggaggaaagtttgcccgggttcacacntcccngggg

SEQ ID NO: 292 - DNA, 604 bp, Homo sapiens
  misc feature (557): n equals a,t,g, or c
  misc feature (580): n equals a,t,g, or c
  misc feature (582): n equals a,t,g, or c
ggcagagtgaaagaaggatgtktttgcttctccttctgccatgattgtaacattcccagaacctggaggccaggctatgacacagagtcaatcaataaccagggagatctgtgaatatagcccagtaggtggggccttgctgccatctgccatatgacccttccagtcccaggcttctgaagagacgtggtaagtgcggtgcagttttcaactgacctctggacgcagaacttcagccatgaaggtaacaggcatctttcttctcagtgccttggccctgttgagtctatctggtaacactggagctgactccctgggaagagaggccaaatgttacaatgaacttaatggatgcaccaagatatatgaccctgtctgtgggactgatggaaatacttatcccaatgaatgcgtgttatgttttgaaaatcggaaacgccagacttctatcctcattcaaaaatctgggccttgctgagaaccaaggttttgaaatcccatcaggtcaccgcgaggcctgactggccttattgttgaataaatgtatctgaatatcnaaaaaaaaaaaaaaggcggccgntntaaaaggatccagctttacgta

SEQ ID NO: 293 - DNA, 510 bp, Homo sapiens
  misc feature (480): n equals a,t,g, or c
  misc feature (491): n equals a,t,g, or c
  misc feature (508): n equals a,t,g, or c
gtgtccccaaactcctggagttttccaccctgagctgttaaaaacctgccctgcctgtcacccatttctgtgccaccagcccaccccctgcctccactctcctccctgccaccttctgtccctgccataggaatatggggacaccgtgtacaccattgaagttccctttcacggcaagacgtttatcctgaaggtgagtgaggggagcgggtgtcctggagccccagacagcacaggaggctccaggaaggtgccgaggggccctctggtgggtgccccccaccaagagggaagggttggtctgcccgagcccatctggcaccacccagccctctgccgccctgtcccagaccttcctgccctgtcctgcggagctcgtgtaccaggaggtgatcctgcagcccgagaggatkgtkctktggaaaagacagtgactgcctgccagatcctgcagcgagtggaagacaacaccctcatctnctatgacgtgnctgcaggggcttgcggncg

SEQ ID NO: 294 - DNA, 845 bp, Homo sapiens
aattcggcagagctgacctgacaagccacctcaagtggacaaggcacttaccaacagagattgctgatttgctccttaagcaagagattcactgccgctaagcatggctcagaccaactcgttcttcatgctgatctcctccctgatgttcctgtctctgagccaaggccaggagtcccagacagagctgcctaatccccgaatcagctgcccagaaggcaccaatgcctatcgctcctactgctactactttaatgaagaccctgagacctgggttgatgcagatctctattgccagaacatgaattcaggcaacctggtgtctgtgctcacccaggcggagggtgccttcgtggcctcactgattaaggagagtagcactgatgacagcaatgtctggattggcctccatgacccaaaaaagaaccgccgctggcactggagtagtgggtccctggtctcctacaagtcctgggacactggatccccgagcagtgctaatgctggctactgtgcaagcctgacttcatgctcaggattcaagaaatggaaggatgaatcttgtgagaagaagttctcctttgtttgcaagttcaaaaactagaggaagctgaaaaatggatgtctagaactggtcctgcaattactatgaagtcaaaaattaaactagactatgtctccaactcagttcagaccatctcctccctaatgagtttgcatcgctgatcttcagtaccttcacctgtctcagtctctagagccctgaaaaataaaaacaaacttatttttaaaaaaaaaaaaaaaaggggggcgctctaaagatccaagcttacttcgcgtgcatg

SEQ ID NO: 295 - DNA, 1046 bp, Homo sapiens
ctgcaggccccggtccggaattcccggggaagaagaggaagaagaagaggacagccaggctgaagtcctgaaggtcatcaggcagtctgctgggcaaaagacaacctgtggccagggtctggaagggccctgggagcgcccaccccctctggatgagtccgagagagatggaggctctgaggaccaagtggaagacccagcactaagtgagcctggggaggaacctcagcgcccttccccctctgagcctggcacataggcacccagcctgcatctcccaggaggaagtggaggggacatcgctgttccccagaaacccactctatcctcaccctgttttgtgctcttcccctcgcctgctagggctgcggcttctgacttctagaagactaaggctggtctgtgtttgcttgtttgcccacctttggctgatacccagagaacctgggcacttgctgcctgatgcccacccctgccagtcattcctccattcacccagcgggaggtgggatgtgagacagcccacattggaaaatccagaaaaccgggaacagggatttgcccttcacaattctactccccagatcctctcccctggacacaggagacccacagggcaggaccctaagatctggggaaaggaggtcctgagaaccttgaggtacccttagatccttttctacccactttcctatggaggattccaagtcaccacttctctcaccggcttctaccagggtccaggactaaggcgtttttctccatagcctcaacattttgggaatcttcccttaatcacccttgctcctcctgggtgcctggaagatggactggcagagacctctttgttgcgttttgtgctttgatgccaggaatgccgcctagtttatgtycccggtggggcacacagcggggggcgccaggttttccttgtcccccagctgctctgcccctttccccttcttccctgactccaggcctgaacccctcccgtgctgtaataaatctttgtaaataaaaaaaaaaaaaaaaaaaaaaaaaaaaaa

SEQ ID NO: 296 - DNA, 1916 bp, Homo sapiens
cggacgcgtgggcgaacagacggtgccctatggactgtccaactacagaggaagcttccggggcaagaggtctgcggggccacttccagggaatctgcagctctcacatcggccacacttgcgctgcgcttgtgtggggagatatgacaaggcctgcctgcacttttgcacccaaactctggacgtcagcagtaattcaaggacggcagaaaaaacagacaaagaagaggaagggaaggttgaagtcaaggaccaacaaagcaagcaggctttagacctccaccatccaaagctcatgcccggcagtggactcgccctcgctccatctacctgcccccgctgcctctttcaggaaggagccccttaggaggacaggcctgcagcatcctggtctcgggaggcttctgtcattgctcacacacagttcagatttccacctctttatagacaagaagtgaatttgcctggggcagaacacccacccaaagagtccccacttaacaatacccccccccacggcaagaatgcccaaatccgaatgaccccagttttcctaatgagtaaaatgatcccagatgtgccccagagcatgacgcctgcagytccggtttcatgcaggaaattggttttggagagttttggcaagttggaaagccacttactggcttttgacatgacttctcttggagaataagtggactccaagctaactctttgcaaatgtaaacacatgtccatcttgtaataaatgcaaaatgcccgtgcagcagaagcatgcgactttcatatccttgcctagaataggctgcatggtgtatgtcagtgagggccacgaggcgtcggctttagacacagatcatagctctwyaggagtttatgaatttgaagcttatgggattttggcagagaaattttcagctgtgcttgatacccaccaaaagaatgtatctcgaaagaatgaaggaagaagaaaaaaggatccttgatgtttgtgacaagaaaatgagaaagttagtatctgcaatacagagcttgttcctgttcagtgactgaccctctgtattctgtatagacaccaggccgatacacagtggagttcccaggccttgtttgcaggaagccgactgtaaagacagccccagctcaaggctattaggttgaatatttgctttcatgagtaaatgtggatctttggggaatggcttcaaaataagtcacgaacacaaattctttgtaaattatgtaaattcctgtttatataaattggcaacaacttataccgtctgacagttcaaaatctctttcagctgcgctcttcccaccgagccgagcttactgtgagtgtggagatgttatcccaccatgtaaagtcgcctgcgcaggggagggctgcccatctccccaacccagtcacagagagataggaaacggcatttgagtgggtgtccagggccccgtagagagacatttaagatggtgtatgacagagcattggccttgaccaaatgttaaatcctctgtgtgtatttcataagttattacaggtataaaagtgatgacctatcatgaggaaatgaaagtggctgatttgctggtaggattttgtacagtttagagaagcgattatttattgtgaaactgttctccactccaactcctttatgtggatctgttcaaagtagtcactgtatatacgtatagagaggtagataggtaggtagattttaaattgcattctgaatacaaactcatactccttagagcttgaattacatttttaaaatgcatatgtgctgtttggcaccgtggcaagatggtatcagagagaaacccatcaattgctcaaatactcagaaagtactgtcaaaagcctaataaaaaacctaaagtttgctctgaaaaaaaaaaaaaaaaaa

SEQ ID NO: 297 - DNA, 1476 bp, Homo sapiens
gggattctcctgtcttagcctcctgagtagctgtgattacaggcatgcgccaccatgcctggctaatttcatattttttagtagagacaggatttctccatgttggtcaggctggtcttgaactcctgacctcaggtgatctgcccaactckgcctmctaaaktgctgggattacaggcatgagccactgcacctggccggttattctststttacagatagctatagacatcattttaggaagtgttgcagtctggcatttgtgctattgttcattctctgtgaaggctgttcatagttgctatagcctgtgtttagttttgtgatttcatcaatcccatctttctgtgtgagtaatgcattctaaacatcctaccccactttagaaacggacgtggggaacgcttggtcatttaagccaacaataaatttaggtgaatgtccctaagtgtttastgtttttatccagtcaaggatttgcttttccttgaacatttgttttaaattctggggccaaaatgcaaaggagaagttctattcaaaggcagtagttgaaatctattattttagttagcctacttggcatttactacatcggtcacttctccaggctgccctaaattaggttgatggagtgagacatgccaaacatccacctttgggaccatagcatagttaaaattaaatgtagttggaatagctagcattgcagctacagtagggaactgtagtctagttccctacagaaaacccaaggrgtgaagggacaggattttgcctaggcaaaaatctaagactcgtgccctcctggtacatggggttttaagactgaatgtgtaataggagcactgcctttgccaaatcaaatgagtgacaggttaactagaaaatgtgacaatcacatttcctcttagctcaaataattctgtttttccaaagctttagcagcttaattaaatctgttggactgggggaggagagagctgttctctagtggttaacatggtattctttaagaagaaaaaacaaagccaaagaaaactcattatctggcatgttcgccttaaagatggtastgggtagaatctggagttttcatctcttttcaaagctgcatatctctyatatttggtattggcctctaagtctaatattgcagttggaattcttgctgtattattttttaagcaagtgttaggtgcatttaactgctttcttcatccatgacgacattcccaccatgggggtcttgacaaagcagagtaaaaatatgctgtttacattgtttacttacaagtaaggagcctgaaataacctgtagtttcgaatgcaggccctgatttactggcgttgtcagtttcaattatgaaactgaagtttggtgcctcctctttatcatgttttttcccttgtagcagttgtgtttaatgtcattaaaaagaaataaaagttctttgtcagtgaaaaaaaaaaaaa

SEQ ID NO: 298 - DNA, 541 bp, Homo sapiens
  misc feature (175): n equals a,t,g, or c
  misc feature (178): n equals a,t,g, or c
  misc feature (249): n equals a,t,g, or c
  misc feature (506): n equals a,t,g, or c
  misc feature (524): n equals a,t,g, or c
tgcaggtaccggtccggaattcccgggtcgacccacgcgtccgatttcaaaagctaatactataatacattttcataaaaatgatgttttaagggtaaaagaaaagaagtaagctattttcctagataaagctgcccagtctaacaagacataaaacatgtttttcggcctaggnttnttatcaatttagagtggtaatgctgggtcagatgttttgattaattaatctttgattaataagtataaganagctaattattagaagagaaggttgttttataaacatcatctttcaaaattcgagatttatggggaataaattaggagaaggtggttaaacctcttcaacaataaattgctctttggggacattttatgcacagaactgtgcaccctcctcagaacagcaggtctttaatggcccatgtgatgagaagggccccatcaaggcagcaggaatgggccactctcccacaccccatgggccaggccactgccactcctgntgccctgcatccccaggnttataggctgcatggta

SEQ ID NO: 299 - DNA, 471 bp, Homo sapiens
  misc feature (437): n equals a,t,g, or c
ctgccccatccactagacaaaagctgactctggaaaacattaggcactcagaatcaagggttctggggtcagatggataattgccatcatcctcaccaagttgccactggactttcttgcccctaaatccactgggcatttcattgctacctttcttgacttcttgattgtttttgtgatactgacacatcccccctttcagaacaccctctgcccttggattctgtgcacaggaagctagttgctcccctgaatacactctttcttccttgtaatacagcctctgattttgagcccaagaataaagactacagttctcagactccttcgcaaataaattttgtgactaaactctagtcaacagtaagtgtcatgtagcagctcctgggaatctcctttaaaaagagagcttgtttataccttattgtcatctctgntcttctgtgccccttcttccattttggctgcctg

SEQ ID NO: 300 - DNA, 942 bp, Homo sapiens
  misc feature (507): n equals a,t,g, or c
gtggaacatacctcagagttatcccacctgcacagggagggagctgaggtatttacccacccatccttgtctcattggtcaagggctatttctgtgcataggcataggcttcagcagaattgcaggtactggcagtcggaaattggaccagcaaacagaaatgattcctacaggggatacaagccaggcacaggcagtgtctgttacttggggttcctgttgcttagagttgaaagcatcataacccatcccaggtgatcatagaaggacctcaaaggaaaaggtgaggggtttggacatttcctgagaatccatgggggaaccattcagggtttggggcaggtgtcaaccacaagaacattaaacaggctcttttggcagcaaagttgggagtggtgttgaagtaactgggaaaactccacagaggctcagcgtccacctctacctgacaccctgccagcaacctgggtgatttccgcaggtgtctgaaccccgatctctcagtgntatggccccactgtgaacccagaaatgccacaccatggaagccacacactctgctgtctccttctgtcctcattcctgtccttctcamagtcagtccctcttggctcttcctagagtccctttcattccctcatttcccacttcctgccgctgtactgtcacctgtggccctggatttgcactcttggtccaacaccctcaactccaacacctctgtctttctgccccatccactagacaaaagctgactctggaaaacattaggcactcagaatcaagggttctggggtcagatggataattgccatcatcctcaccaagttgccactggactttcttgcccctaaatccactgggctttgtttgcaactttctgataatttataattatttcaaaataaaaaaattttaaaaataaaaaaaaaaaaaaaaaat

SEQ ID NO: 301 - DNA, 461 bp, Homo sapiens
  misc feature (1): n equals a,t,g, or c
  misc feature (345): n equals a,t,g, or c
  misc feature (363): n equals a,t,g, or c
  misc feature (444): n equals a,t,g, or c
nscakmcgaggstagctgagggacgcagctagaccttggcgggacggggctttcgccggggcccaggcccagggaccaggcggaggcgtcgcgggagcctttggggcaccacagagatgcgggtttgcctgcaatgagatttcattctctacatttaaaggacatcctttctgagctgctgtgaataaatttggaatggtactgtatattttcatctaatggagaactagctgtactttgaataaggattgctgcactggacgactttagaacatccctcacaatgtcgtcaacccggagccagaacccccacggcctgaagcagattggcctggaccagatctngggacgacctcagagccnggcatccagcaggtgttacacamgggcagagcatgggccaagttccagatatatggagytctaacagtaatcctcctggcntagcgcaggttgattgc

SEQ ID NO: 302 - DNA, 906 bp, Homo sapiens
  misc feature (584): n equals a,t,g, or c
  misc feature (627): n equals a,t,g, or c
  misc feature (863): n equals a,t,g, or c
gctgactccctctggtttccggtcaggtcggtcggtccccactatgggcctggagctgtacctggacctgctgtcccagccctgccgcgctgtttacatctttgccaagaagaacgacattcccttcgagctgcgcatcgtggatctgattaaaggtcagcacttaagcgatgcctttgcccaggtgaaccccctcaagaaggtgccagccttgaaggacggggacttcaccttgacggagagtgtggccatcctgctctacctgacgcgcaaatataaggtccctgactactggtaccctcaggacctgcaggcccgtgcccgtgtggatgagtacctggcatggcagcacacgactctgcggagaagctgcctccgggccttgtggcataaggtgatgttccctgttttcctgggtgagccagtatctccccagacactggcagccaccctggcagagttggatgtgaccctgcagttgctcgaggacaagttcctccagaacaaggccttccttactggtcctcacatctccttagctgacctcgtagccatcamggagctgatgcatcccgtgggtgctnggctgccaagtcttcgaaggccgacccaagctggccacatggnggcaggcgtggaggcagcagtgggggaggacctcttccaggaggcccatgaggtcattctgaaggccaaggacgacttcccacctgcagaccccaccataaagcagaagctgatgccctgggtgctggccatgatccggtgagctgggaaacctcacccttgcaccgtcctcaagcaagtccacaaaagcattttcatttctaatgggccatgggagccaggcccagaaaagcacngaattggcttgcttaagacttgcccaagttcccagagcacctt

SEQ ID NO: 303 - DNA, 620 bp, Homo sapiens
  misc feature (125): n equals a,t,g, or c
  misc feature (620): n equals a,t,g, or c
tggatgagtacctggcatggcagcacacgactctgcggagaagctgcctccgggccttgtggcatcccgtgggtgctggctgccaagtyttcgaaggccgacccaagctggccacatggcggcancgcgtggaggcagcagtgggggaggacctcttccaggaggcccatgaggtcattctgaaggccaaggacttcccacctgcagaccccaccataaagcagaagctgatgccctgggtgctggccatgatccggtgagctgggaaacctcacccttgcaccgtcctcagcagtccacaaagcattttcatttctaatggcccatgggagccaggcccagaaagcaggaatggcttgcttaagacttgcccaagtcccagagcacctcacctcccgaagccaccatccccaccctgtcttccacagccgcctgaaagccacaatgagaatgatgcacactgaggccttgtgtcctttaatcactgcatttcattttgattttggataataaacctgggctcagcctgagcctctgcttctaaaaaaaaaaaaaaaaaaaaaaaaaaaaaaaaaaaaaaaaaaaaaaaaaaaaaaaaaaaaaaaaaaaaaaaaaaaaan

SEQ ID NO: 304 - DNA, 533 bp, Homo sapiens
ggcacgagsggcgggaacacgcggggcccaagatggcggccagccggtaccggcgttttcttaagctctgtgaggaatggccagtggacgagaccaaacggggccgggacttgggcgcttacctgcgacagcgggtagcacaggcctttcgggagggagagaatacccaggttgcagagcctgaggcctgtgatcagatgtacgagagcttagcgcgactccattcaaactactacaaacacaagtaccctcgccccagagacaccagcttcagtggcctgtcgttggaagagtacaagctgatcctgtccacagacaccttggaagagcttaaggaaatagataaaggcatgtggaagaaactgcaggagaagtttgcccccaagggtcctgaggaggatcataaggcctgagctcaggccttacctcgtgcacatacctaggtgtggagtcttgtacattgccatcgtcaataaaactgccccagtttccccttgaaaaaaaaaaaaaaaaaraaaaagaaaaaagtcgac

SEQ ID NO: 305 - DNA, 1374 bp, Homo sapiens
  misc feature (1232): n equals a,t,g, or c
aaacaggaaataaatacgaatgaaactgagctctaagcagcatgtaacctggcctgcatccaggaaatagaggacttcggatccttctaaccctaccacccaactggccccagtacattcattctctcaggaaaaaaaacaaggtccccacagcaaagaaaaggaataggatcaagagatacgtggctgctggcagagcaagcatgaattcgatgacttcagcagttccggtggccaattctgtgttggtggtggcaccccacaatggttatcctgtgaccccaggaattatgtctcacgtgcccctgtatccaaacagccagccgcaagtccacctagttcctgggaacccacctagtttggtgtcgaatgtgaatgggcagcctgtgcagaaagctctgaaagaaggcaaaaccttgggggccatccagatcatcattggcctggctcacatcggcctcggctccatcatggcgacggttctcgtaggggaatacctgtctatttcattctacggaggctttcccttctggggaggcttgtggtttatcatttcaggatctctctccgtggcagcagaaaatcagccatattcttattgcctgctgtctggcagtttgggcttgaacatcgtcagtgcaatctgctctgcagttggagtcatactcttcatcacagatctaagtattccccacccatatgcctaccccgactattatccttacgcctggggtgtgaaccctggaatggcgatttctggcgtgctgctggtcttctgcctcctggagtttggcatcgcatgcgcatcttcccactttggctgccagttggtctgctgtcaatcaagcaatgtgagtgtcatctatccaaacatctatgcagcaaacccagtgatcaccccagaaccggtgacctcaccaccaagttattccagtgagatccaagcaaataagtaaggctacagattctggaagcatctttcactgggaccaaaagaagtcctcctccctttctgggcttccataacccaggtcgttcctgttctgacagctgaggaaacgtctctcccactgtttgtactctcaccttcattcttcaattcagtctaggaaaccatgctgtttctctatcaagaagaagacagagattttaaacagatgttaaccaagagggactccctagggcacatgcatcagcacatatgtgggcatccagcctctggggccttggcnacacacattcgtgtgctctgctgcatgtgagcttgtgggttagaggaacaaatatctagacattcaatcttcactctttcaattgtgcattcatttaataaatagatactgagcattcaaaaaaaaaaaaaaaaaaactcga

SEQ ID NO: 306 - DNA, 668 bp, Homo sapiens
  misc feature (558): n equals a,t,g, or c
  misc feature (575): n equals a,t,g, or c
gcggacgtgggcaggagggctggaaaagccggcgctggagcgggaacgggagtagctgcctgggcgccaaaggccgcggcactcccacgcggaccccgaagtccgcaacccggggatgggcccgcggctgcraggggatcttctctggatcaagcaatggtggtgaaaaatgtttcgcaagggcaaaaaacgacacagtagtagcagttcccaaagtagcgaaatcagtactaagagcaagtctgtggattctagccttgggggtctttcacgatccagcactgtggccagcctcgacacagattccaccaaaagctcaggacaaagcaacaataattcagatacctgtgcagaatttcgaataaaatatgttggtgccattgagaaactgaaactctccgagggaaaaggccttgaagggccattagacctgataaattatatagacgttgcccagcaagatggaaagttgccttttgttcctccggaggaagaatttattatgggagtttccaagtatggcataaaagtattcaacatcagrtcaatatgtaagtnatataatttattaaganaactatgttttagataacagggaattcaggccattaagagcccccttataattagggccactcctgtttgcagagtgattggtttgtaaacat

SEQ ID NO: 307 - DNA, 1046 bp, Homo sapiens
  misc feature (4): n equals a,t,g, or c
  misc feature (14): n equals a,t,g, or c
  misc feature (946): n equals a,t,g, or c
  misc feature (948): n equals a,t,g, or c
cggnacgcgtgggncggacgcgtggggttttgaatgttcatgtatgaatgctgcagctgtgaagcatacataaataaatgaagtaagccatactgatttaatttattggatgttattttccctaagacctgaaaatgaacatagtatgctagttatttttcagtgttagccttttactttcctcacacaatttggaatcatataatataggtactttgtccctgattaaataatgtgacggatagaatgcatcaagtgtttattatgaaaagagtggaaaagtatatagcttttagcaaaaggtgtttgcccattctaagaaatgagcgaatatatagaaatagtgtgggcatttcttcctgttaggtggagtgtatgtgttgacatttctccccatctcttcccactctgttttctccccattatttgaataaagtgactgctgaagatgactttgaatccttatccacttaatttaatgtttaaagaaaaacctgtaatggaaagtragactccttccctaatttcagtttagagcaacttgaagaagagtagacaaaaaataaaatgcacatagaaaaagagaaaaagggcacaaagggattggcccaatattgattcttttttataaaacctcctttggcttagaaggaatgactctagctacaataatacacagtatgtttaagcaggttcccttggttgttgcattaaatgtaatccacctttaggtattttagagcacagaacaacactgtgttgatctagtaggtttctatttttcctttctctttacaatgcacataatactttcctgtatttatatcataacgtgtatagtgtaaaatgtgaatgactttttttgtgaatgaaaatctaaaatctttgtaactttttatatctgcttttgtttcaccaaagaaacctaaaatccttcttttamwananaaaaaaaaaaaaaaaaaaaaaaaaaaaaaaaaaaaaaaaaaaaaaaaaaaaaaaaaaaaaaaaaaaaaaaaaaaaaaaaaaaaagggcggccgtttta

SEQ ID NO: 308 - DNA, 1686 bp, Homo sapiens
  misc feature (7): n equals a,t,g, or c
  misc feature (29): n equals a,t,g, or c
  misc feature (39): n equals a,t,g, or c
  misc feature (117): n equals a,t,g, or c
  misc feature (1522): n equals a,t,g, or c
  misc feature (1551): n equals a,t,g, or c
  misc feature (1627): n equals a,t,g, or c
  misc feature (1673): n equals a,t,g, or c
  misc feature (1686): n equals a,t,g, or c
aaattcnaaatactagttttgaaagtaanataccttgtnatagttatctttttatatgaaaatgaactctaaatacatatctttctttcaatgttcatatcaacaaagctccaattnaatggtccctggaaaaaaaaaaatcgttccatgttgttcccaggtcccgttcaagaagttcttcccagttcgagtcaagatctcgttccagttccagagaacgttcgagatctcgtgggtcgaaatcaagatccagctccaggtccacaggggctcttcttccccacgaaaaagatcttattcaagttcatcatcttctcctgagaggaacagaaagagaagtcgttctagatcttcttcatctggtgatcgcaaaaaaagacgaacaagatcacggtcacccgaaagccaggtgattggtgaaaacactaaacaaccctgagcccagggccaaccctacggaacaccactactttacccagacgccacaggtcatcatctggatcatcccattctggttcccgttcaagttcaaaaaagaaataatgtattaaaatttacatcttaaaaaaatccagtacagtgcatgaagcatatttttaaagaagttggtgtcttacttggtcagaagtgctaaatctgctagtagaggtgcatgcctttcattgcttttcaaaacaatacagctgtgtttatttgtgaagttaaaagtaaatagcattttaagccataatgtcccaaaatagatgttctgtcattcattatttacaaccatttgcttcatttaaaaccatttcagctataacaaagtactttgcttcctaatttaaacccatttttgtcatttccaaatacatcctgtccattggctaagacaggattacctaggcttgcctgaactttgggcatggaagaaagactggaaactagttggaaacaacatacttatggaaaagaaagtcagcctttttatgctgttaacagatgtcagagtgattctcaccaaaaaaagttaaactatgttgtaagcagccaactgtaaatgtctattttgaaattccctatgctaagggtgccttagaatcattgtgtctcttttatccagctttacttttttgctccacatttaatgcaaaagaatcttgtgatgtctacaaggagagaagtgggatatattttcctttctgacacataatttggggcaaaaaagaaagtcttaagagtttatcttttctctgctgatacggttgcttgataaagacatctcaaaatgtttaccaatgttttaagaagctttgtgtgatattcttccaaatgtagttaccaaatataatatggtagaaaaggctaaatcatacttaatgagcaaattgaagtaagcttttaaagtatatttctcttttggtgaaaggccaatggagacattgtgaatttaagtgaacatttgcctcaagatgttaactataaacacactgcatacaattttcttctgaataacaaatgaatgcttattgctgcatgatgntaagcaaaagtcwttattttycctatcmnttgaaataagttatggcttaaaagcytttggarttattctcaaaattaaaatctggtcacatgagctttaatttgntttctggtttaaaaaataaaaagggttctcttacagtatttccagngcaatgcaaggan

SEQ ID NO: 309 - DNA, 1426 bp, Homo sapiens
  misc feature (1350): n equals a,t,g, or c
  misc feature (1391): n equals a,t,g, or c
tcttcactctgatgagggctcagacttgataacgcccgtggtgccccatccctataggagctggtgagattgcagcctgctgcctcccctccatcagccacagctattggatttcccacccagaatctttaggtaaatgagatcatgattctggaaggaggtggtgtaatgaatctcaaccccggcaacaacctccttcaccagccgccagcctggacagacagctactccacgtgcaatgtttccagtgggttttttggaggccagtggcatgaaattcatcctcagtactggaccaagtaccaggtgtgggagtggctccagcacctcctggacaccaaccagctggatgccaattgtatccctttccaagagttcgacatcaacggcgagcacctttgcagcatgagtttgcaggagttcacccgggcggcagggacggcggggcagctcctctacagcaacttgcagcatctgaagtggaacggccagtgcagtagtgacctgttccagtccacacacaatgtcattgtcaagactgaacaaactgagccttccatcatgaacacctggaaagacgagaactatttatatgacaccaactatggtagcacagtagatttgttggacagcaaaactttctgccgggctcagatctccatgacaaccaccagtcaccttcctgttgagtcacctgatatgaaaaaggagcaagacccccctgccaagtgccacaccaaaaagcacaacccgagagggactcacttatgggaattcatccgcgacatcctcttgaacccagacaagaacccaggattaataaaatgggaagaccgatctgagggcgtcttcaggttcttgaaatcagaggcagtggctcagctatggggtaaaaagaagamcaacagcagcatgacctatgaaaagctcagccgagctatgagatattactacaaaagagaaattctggagcgtgtggatggacgaagactggtatataaatttgggaagaatgcccgaggatggagagaaaatgaaaactgaagctgccaatactttggacacaaaccaaaacacacaccaaataatcagaaacaaagaactcctggacgtaaatatttcaaagactacttttctctgatatttatgtaccatgaggggaacaagaaactacttctaacgggaagaagaaacactacagtcgattaaaaaaattattttgttacttcgaagtatgtcctatatggggaaaaaacgtacacagttttctgtgaaatatgatgctgtatgtggttgtgattttttttcacctctattgtgaattctttttcactgcaagagtaaccaggntttgtagccttgtgcttcttgcctaagagaaaggaaaaacnaaatcagagggcattaaatggttttgtatggtgac

SEQ ID NO: 310 - DNA, 1493 bp, Homo sapiens
  misc feature (975): n equals a,t,g, or c
  misc feature (1483): n equals a,t,g, or c
  misc feature (1492): n equals a,t,g, or c
ccctccctccctccctcactgcttccctccctctctctccctctccctttcttttctacattgaaatctgttcttacataatagagaacagggctattgaataaagacccaatcctaccagatctttagttctaaagggcaacttgactgtgagtaggagggcccccaagaaaggraggaaagtccacacccagctaaccacacaacagggcttcattatggaaatattttaacaaaagtacatgttattaccaaccaaagagatgcatgtgcaatagaagccttccttaaaaacaggctaaataacctcattttatgcagcagtttaatctgagaacagagggaaaggtgtgcagtggttccagaggggccttatattctatttttagtctagatattttttgtttataaattcccaaggaattgttaacactttggtgacacctaatggattctttttgaaattccaaggtgcttcagttctttgcccaagtgaactgtgccttttattgcatttctgttcgtctcttggtggctcttctgactttttggagaatacccatcttgttggaggcagacttaagttgttatgctgtgccacacaatttactgagacaatcatatcttcctaagcatttaaggaaagttgaaaaaaatagaattagctataaaatatgtatggcacatcttgtttaattttgcatgtaacttctcttttgtacattgatgaggttttagtgacattgtcatccaacactttacctttattgttcagggaatgccttcgtgattttttgtactggttttattattcagactatggcctggatttgagtatattgttattaccacctggttttttaattattcatcccagtaaacttatattttgtgaagcatttgtttctcagattaagacactgttagaacctaaagtagtagctgatgggtatctgtgaattttttttttktttnttttttttacttgaagtagattgtctgaataggcatcctcatctatatttacccaaaacctcgcttactgtcatgtgcactacaaattgcaatttggaaacctactgtattgaaattctgtcagtttatggttcttgaagactgatgtcctttcccaaacactggttactgcagcagcatttttaatgtgtaagtgaagaaaaaaggccactaaggccaaagattttttaagaatcattgtacaaatcattatgttaaactatctaagctttgctgtaatactgttttctcttcaatatgtgatggtacaggaaggatgttaaatgaaggggtggtattgcaggagagcattttaaatggcagaagtaaaaagttataatatttataattttgatgggtttaagtttatttttgtagggaagatttttctcccctaaaatagtttctagaatggcaaaattgtttccattattaaaaattgaagttattagttaaaaaaaaaaaaaanaagaaaaana

SEQ ID NO: 311 - DNA, 2342 bp, Homo sapiens
  misc feature (2322): n equals a,t,g, or c
  misc feature (2327): n equals a,t,g, or c
  misc feature (2338): n equals a,t,g, or c
ggttctagatcgcgggcggccgctcgcgagcagctgccgaagtcagttccttgtggagccggagctgggcgcggattcgccgaggcaccgaggcactcagaggaggtgagagagcggcggcagacaacaggggaccccgggccggcggccagagccgagccaagcgtgcccgcgtgtgtccctgcgtgtccgcgaggatgcgtgttcgcgggtgtgtgctgcgttcacaggtgtttctgcggcaggcgccatgtcagaaccggctggggatgtccgtcagaacccatgcggcacaaggcctgccgccgcctcttcggcccagtggacagcgagcagctgagccgcgactgtgatgcgctaatggcgggctgcatccaggaggcccgtgagcratggaacttcgactttgtcaccgagacaccactggagggtgacttcgcctgggagcgtgtgcggggccttggcctgcccaagctctaccttcccacggggccccggcgaggccgggatgagttgggaggaggcaggcggcctggcacctcacctgctctgctgcaggggacagcagaggaagaccatgtggacctgtcactgtcttgtacccttgtgcctcgctcaggggagcaggctgaagggtccccaggtggacctggagactctcagggtcgaaaacggcggcagaccagcatgacagatttctaccactccaaacgccggctgatcttctccaagaggaagccctaatccgcccacaggaagcctgcagtcctggaagcgcgagggcctcaaaggcccgctctacatcttctgccttagtctcagtttgtgtgtcttaattattatttgtgttttaatttaaacacctcctcatgtacataccctggccgccccctgccccccagcctctggcattagaattatttaaacaaaaactaggcggttgaatgagaggttcctaagagtgctgggcatttttattttatgaaatactatttaaagcctcctcatcccgtgttctccttttcctctctcccggaggttgggtgggccggcttcatgccagctacttcctcctccccacttgtccgctgggtggtaccctctggaggggtgtggctccttcccatcgctgtcacaggcggttatgaaattcaccccctttcctggacactcagacctgaattctttttcatttgagaagtaaacagatggcactttgaaggggcctcaccgagtgggggcatcatcaaaaactttggagtcccctcacctcctctaaggttgggcagggtgaccctgaagtgagcacagcctagggctgagctggggacctggtaccctcctggctcttgatacccccctctgtcttgtgaaggcagggggaaggtggggtcctggagcagaccaccccgcctgccctcatggcccctctgacctgcactggggagcccgtctcagtgttgagccttttccctctttggctcccctgtaccttttgaggagccccagctacccttcttctccagctgggctctgcaattcccctctgctgctgtccctcccccttgtcctttcccttcagtaccctctcagctccaggtggctctgaggtgcctgtcccacccccacccccagctcaatggactggaaggggaagggacacacaagaagaagggcaccctagttctacctcaggcagctcaagcagcgaccgccccctcctctagctgtgggggtgagggtcccatgtggtggcacaggcccccttgagtggggttatctctgtgttaggggtatatgatgggggagtagatctttctaggagggagacactggcccctcaaatcgtccagcgaccttcctcatccaccccatccctccccagttcattgcactttgattagcagcggaacaaggagtcagacattttaagatggtggcagtagaggctatggacagggcatgccacgtgggctcatatggggctgggagtagttgtctttcctggcactaacgttgagcccctggaggcactgaagtgcttagtgtacttggagtattggggtctgaccccaaacaccttccagctcctgtaacatactggcctggactgttttctctcggctccccatgtgtcctggttcccgtttctccacctagactgtaaacctctcgagggcagggaccacaccctgtactgttctgtgtctttcacagctcctcccacaatgctgaatatacagcaggtgctcaataaatgattcttagtgactttaaaaaaaaaaaaaaaaaaaaaaggggggggggccccggtacccaaantttgncccctaaaagnggag

SEQ ID NO: 312 - DNA, 854 bp, Homo sapiens
  misc feature (850): n equals a,t,g, or c
  misc feature (854): n equals a,t,g, or c
ctgcatttgcctgtcatgcgcaactggagccagcaaccagcacatccatcagcaccccagtggaggagttcatggaagagttccctctttgtttctgcttcatttttctttcttttcttttctcctaaagcttttatttaacagtgcaaaaggatcgtttttttttgcttttttaaacttgaatttttttaatttacactttttagttttaattttcttgtatattttgctagctatgagcttttaaataaaattgaaagttctggaaaagtttgaaataatgacataaaaagaagccttctttttctgagacagcttgtctggtaagtggcttctctgtgaattgcctgtaacacatagtggcttctccgcccttgtaaggtgttcagtagagctaaataaatgtaatagccaaacccactctgttggtagcaattggcagccctatttcagtttattttttcttctgttttcttcttttctttttttaaacagtaaaccttaacagatgcgttcagcagactggtttgcagtgaattttcatttctttccttatcacccccttgttgtaaaaagcccagcacttgaattgttattactttaaatgttctgtatttgtatctgtttttattagccaattagtgggattttatgccagttgttaaaatgagcattgatgtacccattttttaaaaaagcaaggcacagcctttgcccaaaactgtcatcctaacgtttgtcattccagtttgagttaatgtgctgagcatttttttaaaagaagctttgtaataaaacatttttaaaaattgtaaaaaaaaaaaaaaaaaaaaaaaaaaaaaaggggggncccn

SEQ ID NO: 313 - DNA, 1501 bp, Homo sapiens
  misc feature (1387): n equals a,t,g, or c
  misc feature (1395): n equals a,t,g, or c
  misc feature (1399): n equals a,t,g, or c
  misc feature (1438): n equals a,t,g, or c
  misc feature (1497): n equals a,t,g, or c
ctcagtacggtcgaattccgggtcgaccacgcgtccgctttctccacccatcccgagaacatcaaataaagtccccgtggtgcagccatcccatgcggtccatcctctcacccccctcatcacttacagtgacgagcacttttctccaggatcacacccgtcacacatcccatcagatgtcaactccaaacaaggcatgtccagacatcctccagctcctgatatccctactttttatcccttgtctccgggtggtgttggacagatcaccccacctcttggctggcaaggtcagcctgtatatcccatcacgggtggattcaggcaaccctacccatcctcactgtcagtcgacacttccatgtccaggttttcccatcatatgattcccggtcctcctggtccccacacaactggcatccctcatccagctattgtaacacctcaggtcaaacaggaacatccccacactgacagtgacctaatgcacgtgaagcctcagcatgaacagagaaaggagcaggagccaaaaagacctcacattaagaagcctctgaatgcttttatgttatacatgaaagaaatgagagcgaatgtcgttgctgagtgtactctaaaagaaagtgcagctatcaaccagattcttggcagaaggtggcatgccctctcccgtgaagagcaggctaaatattatgaattagcacggaaagaaagacagctacatatgcagctttatccaggctggtctgcaagagacaattatggtaagaaaaagaagaggaagagagagaaactacaggaatctgcatcaggtacaggtccaagaatgacagctgcctacatctgaaacatggtggaaaacgaagctcattcccaacgtgcaaagccaaggcagcgaccccaggacctcttctggagatggaagcttgttgaaaacccagactgtctccacggcctgcccagtcgaccccaaaggaacactgacatcaattttaccctgaggtcactgctagagacgctgatccataaagacaatcactgccaacccctctttcgtctactgcaagagccaagttccaaaataaagcataaaaaggttttttaaaaggaaatgtaaaagcacatgagaatgctagcaggctgtggggcagctgagcagcttttctccccccatatctgcgtgcacttcccagagcatcttgcatccaaacctgtaacctttcggcaaggacggtaacttggctgcatttgcctgtcatgcgcaactggagccagcaaccagcacatccatcagcaccccagtggaggagttcatggaagagttccctctttgttctgcttcatttttctttcttttsttttcctcctaaagctttaattaacaagnggcaaaanggancgtttttttttggtttttttaaaacctggaatttttttnaattaacactttttaagttttaaattttcttgggaaaatttggctaagcttttgaaccntttt

SEQ ID NO: 314 - DNA, 1193 bp, Homo sapiens
  misc feature (999): n equals a,t,g, or c
  misc feature (1069): n equals a,t,g, or c
  misc feature (1190): n equals a,t,g, or c
ggaagattccttttctgggagtttgtcttgggatgcaactagcagtgatagagtttgcaagaaactgccttaacttgaaagatgctgattccacagagtttaggccaaatgccccagttcctctggtgattgatatgcccgagcacaaccctggcaatttgggaggaacaatgagactgggaataagaagaactgttttcaaaactgaaaattcaatattaaggaaactttatggtgatgttccttttatagaagaaagacacagacatcggttcgaggtaaaccctaacctgatcaaacaatttgagcagaatgacttaagttttgtaggtcaggatgttgatggagacaggatggaaatcattgaactggcaaatcatccttattttgttggtgtccagttccatcctgagttttcttctaggccgatgaagccttcccctccgtatctggggctgttacttgcagcaactgggaacctgaatgcctacttgcaacagggttgcaaactgtcttccagtgatagatacagtgatgccagtgatgacagcttttcagagccaaggatagctgagttggaaataagctgaaatgaatacatgactgggaataatggggactgcctgtgaggcctctgaaataattgaaggcaagatgaaggaactatctgaagaaatcactacactcttagagaatccctctgttctccagcaaacatgggatgtaaagcctcacagggaatctgataatacatacttctgtcaaccagaaccagaggggtagttttcttttccctccagaggcagcctttggtacttaaaatatctgtagctgattaaatttttcccaacaacctcactggggagaaagtgtgttcatgttttgtccagcggatcaggatgttaggatgacgagcaagagtccaggtcactgtgcctttgctgtgttgtatggaaaggatggcagggaacatgctgtaagtaattttgagtaagaaantgagtcactgtgttacctggaactcagccacagatttgtgtgtggtccaagatcattgcagtttctcacnctgtttatttcctggtaaaagtaaaattgaataggtccaagacttgggggtggcaagtaaggctttgcctcaagcacaaaatttaagggggctccaaaaaactcaggaatccaaggggggnggg

SEQ ID NO: 315 - DNA, 798 bp, Homo sapiens
  misc feature (547): n equals a,t,g, or c
  misc feature (718): n equals a,t,g, or c
  misc feature (771): n equals a,t,g, or c
  misc feature (783): n equals a,t,g, or c
  misc feature (793): n equals a,t,g, or c
ggccatgggctgcccttgttttgggttgtgggtttctgttcagtgagaacgcaactcaatccaaagtgaatgaaaccaagttggaaggcagggagggaactggctttgagatgacagggtccaggatgtgaatgcagctgagactggttcttgtccctccctcttgtccctcggattgataacttgtactcaactacatgcttttgtcagggaaccctggctgctggccttctgggtcccctaaccataagaaaaaggaccttccgttagtgtaaagcccaaggcaggattctgcttggctgggcttcgatctggtacccatagctggaccaatcatgacatcccagatggggtcacgtggccaacctgccgcaagggggtggggtctgtaccggaagacaggaggggaggggtgcagatcggacaggaagtaatggcatcccaggccccgaattgctgcaaccctggaggccagcccsgagttgagactactggttttagagcagttcctctgccttcctaagctccacacctgtcaggattctgntacttcttggtaactgggacttgccaactttaaaaacattatttaaaaaaatagtaatgtgcacatgtaaaagattcaaatagtatatatacaaggtgtacagtaaaaaagtaaacttcccttcatcccaagcctggcagcattccctgatgccgactttctgggtgtggnctaaggccccttaatgtaatgtaaggggttgtgaacacaagaacttttggtgncaagtttgctanggttcgaatncctga

SEQ ID NO: 316 - DNA, 1935 bp, Homo sapiens
  misc feature (37): n equals a,t,g, or c
  misc feature (38): n equals a,t,g, or c
tgagctgcaggtcgacactagtggatccaaagaagcnnggcacgagagaatggcagcaagttgacaggcagctgccttcactggcatgcaaatatccagtttcttccagggaggcaacacagatattatcagttccaaaagtagatgatgaaatcctagggtttatttctgaagccactccactaggaggtattcaagcagcctccactgagtcttgcaatcagcagttggacttagcactctgtagagcatatgaagctgcagcatcagcattgcagattgcaactcacactgcctttgtagctaaggctatgcaggcagacattagtsaagctgcacagattcttagctcagatcctagtcgtacccaccaagcgcttgggattctgagcmaaacatatgatgcagcctcatrtatttgtgragctgcatttgatgaagtgaagatggctgcccataccatgggaaatgccactgtaggtcgtcgatacctctggctgaaggattgcaaaattaatttagcttctaagaataagctggcttccactccctttaaaggtggaacattatttggaggagaagtatgcaaagtaattaaaaagcgtggaaataaacactagtaaaattaaggacaaaaagacatctatcttatctttcaggtactttatgccaacattttcttttctgttaaggttgttttagtttccagatagggctaattacaaaatgttaagcttctacccatcaaattacagtataaaagtaattgcctgtgtagaactacttgtcttttctaaagatttgcgtagataggaagcctggtacaaacaatttaacgctttctagatcacatattagtctctaagttgttttctgtttcctgctttacttatgtttttacaattctccaaaactaagaaaattctaattaggatataaggagtatttactgttcaatagaataatatgcatcctcctttatacctaggacagaattaaacatttgttacacattcagaacagtgatgttgttctttttgatacttttatctcagtatcttttcacgttccataacttgtccatatttttgctcatattttcttacttttctttgttatttattcatgtctgcaacatcaatcatagtagtctagatcaatgcaactcaaagcaccagtctacaaactgttacttatccacaggcaagataagcatgcacaagaatttaaatctaragatactttttaggtcaatgacaggatttgattttttagcaaaattttattaatagctaaagcaatgtattgatttacactctgatgcaagtaatttatctcttcattgactggtagcaaccaattcatggaccagtaccatggaccacactttgagaaacacttctttggataataatagatatcctgggatagtgcatgttcaccatctattttgtcagataatggggccttttaaaaaataatactttgctttcatgatatattgtattttgtggaaagttaagtttagcaatatagactctaaaagcaaattaaatttttttaagccataagaaattatactatatcccagtatctgtatgtctgtataaagcagtgtattatcatgttttcatttctgtgattgtaagttaagagtcttaactgcagaggtattgtggaaagtagtagccttaagcataataaaatatggtctcttgggtactccctctggccattaccacattcttagattatatgtgtccatctttgcagctttctgagagtaattttatttgttgtcttctgaaatgtacatgtatacatgtacctactgagtgctatgtgatttttaaaaatgtattactgtagaatgcttctgcaaattcaataaagttgttaaatttgaaaaaaaaaaaaaaaaaaaaaaaaaaaaaa

SEQ ID NO: 317 - DNA, 1738 bp, Homo sapiens
  misc feature (22): n equals a,t,g, or c
  misc feature (1723): n equals a,t,g, or c
  misc feature (1732): n equals a,t,g, or c
cattttcaacaagacccatcgnactgacactgatgcttatggctgttctgaactgtctcttcgactcattgagccagatgctgaggaaaaatgtagaaaagcgagcactgctggagaacatggaggggctgttcttggctgtggatgaaattgtagatggaggggtgatcctagagagtgatccccagcaggtggtacaccgggtggcattaaggggtgaagatgtcccccttacggagcagaccgtgtctcaggtgctgcagtcagccaaagaacagatcaagtggtcactccttcggtgaagacctcactgttcctggctcttcatcctcttcaaaaaatttgcatgtctgctgtgaattttcatctagttccccaatcgatgctctcagggtcatctcggggatcacagggatccttaaatctccattctgtttgtggttgccccctcaacctcccctacacccttcctattctttttcattcttcttgcagttctgggagtaaagctcccagcatatttagataatagggcaggggaagcaccctctttctttctagactggattatgctcacatgctcccttgccctgacatttttgtaaattctgtgccctttgctgtagctacacttcagattaaagtaggagaaagaatgtgctgagtgttttcctccctttgcctctacctggccctcatcccaacagcccagcaaggggagagagaaagagaattcttttctatagaacgagtgggggcggggatgggtagggatttatccaatctaagccctaaccccacttagtgacctcagtgttttcttccattccttcttactgccctgtcctctgccttggaagaggctttgggaatagttcatagggaagggacaacatggaagaaacagcgatttaaattgtattgaacagggcatataaaatgcattctgtaccctgatctggcatatagcttcaaaactgcagtggcgagtgtccatctcttagttagctaccttaactgtccacccttactacctgtgggatcgttgcctggtttgtcttctctgtgtcctggagcaaagccagttcctaaaactaaaactccattctagtcttgggaagaaaagtttctactcagaactggggaaggagtggaacttatgacttgggcctctaggctgtctctgtcccctcagctccccgacatgcatttactctctgccgtgggtctgcagtcgctgcaacctaccctctctctgcctcagccttacacccaagcagtaggtctgtgctctccctgtctctaggtcgctgagagaggtgcttttcttcataaaacctttggggtttggatttccccaggaagatggagaatggaatactcactcttgggtctaatctttccccttgacccagaacttcctccccacaaaaatgcctttaaaaaccttcctgagacttaagcattctgccccacttactaactgccagttctccagcactgaggtggggcagataacggggcatatttaagggggcatctttgtgtaaaagatgcatggagtcaggagaaaaccaccttcataaactgctctgtgcaaagaggaataaaacattttttccaaaaaaaaaaaaaaaaaaaaaaaaaaaaaaaaaaaaaaaaaaaaaaaaaaaaaaaaaaaaaaaaaaaaaaaaaaaaaaaaaaaaaaaaaaaaaaaaaaaanggggggccnttttaa

SEQ ID NO: 318 - DNA, 1340 bp, Homo sapiens
  misc feature (29): n equals a,t,g, or c
  misc feature (67): n equals a,t,g, or c
  misc feature (1340): n equals a,t,g, or c
tttaggtgacactatagaaggtacgcctncaggtaccgggtccggaattcccgggtcgacccacgcntcccgggaggagaagtccaagcagttcctcgacttgatggagactattgataagcagcgagaagagatggccaagagcagcagggcgtcggcagcccgtgtagggaagcttcaggaagccctgaatgagaggcactccatcatcaacgctctcaaggccaagctgcagatgacagaggccgccctggctctgtcggagcagaaggcccaggacctgggggagctcctggccacagcggagcaggagcagctgagcctgtcacagaggcaggccaaggagctcaagctggagcagcaggaagctgcagagcgggagtctaaactcctcagagacttgtctgctgycaatgaaaagaacctgcttctgcaaaaccaggtagacgagttggagcggaagttcaggtgtcagcaggagcagctgttccagaccaggcaggagatgaccagcatgtcagctgagctgaagatgcgggccatccaggcgaggagcgcctggacatggagaagagaagatgcagacagagcctggaggactccgaaagcctgcgcatcaaggaggtggagcatatgacccgtcacctggaggagagtgagaaggccatgcaggagcgggtgcagaggctggaggcggcgcggctgtccctggaggaggagctgagccgagtgaaagcagcggcactcagcgagcgtggccaggctgaggaggagctgatcaaggccaagagccaggcccgcctggaggagcaacagcgcctggctcacctggaggacaagctgagactgctggcgcaggcacgggacgaggcgcagggcgcttgcctacagcagaagcaggtggtggccgaggcccagacccgggtcagccagctgggcctgcaagttgagggcctgcggcggcgcctggaagagctgcagcaggagctgagcctcaaggaccaggaaagggtggccgaggtgagcagggtgcgcgtggagctgcaggagcagaacggccggctgcaggcggagctkgcggctcaggaggcgctgagggagaaggcggcggccctggagcgccagctgaaagtgatggcgagcgaccaccgagaggcgctgctggacagggagagcgagaacgcgtctctycgggagaagctgcggctccgggaggcggagatcgccccgcatccgggacgaggaggcccaraagggcgagcttcctgcagaacgccgtcctggsttacgtgcaggcgtccccgtgaggaccctgaccccccaaagtgagacaggcccgn

SEQ ID NO: 319 - DNA, 784 bp, Homo sapiens
  misc feature (511): n equals a,t,g, or c
  misc feature (603): n equals a,t,g, or c
  misc feature (643): n equals a,t,g, or c
  misc feature (754): n equals a,t,g, or c
  misc feature (763): n equals a,t,g, or c
  misc feature (778): n equals a,t,g, or c
gcgcgggttcagacctgccgagcgcccgccgccgcgggaggggcttgaggccggggcggggcggggcggggcgtccccctcgtaggctccgggccgcgcattctcagcgctgggagccgccgcccccgcagctgcgcgccgccgccagggcccggactcggacgcgtgcctagagtcctggggagcttctgtccacctgtcctgcagaggagtcgtttccagcccggctgccccaggatgggtgagttcaacgagaagaagacaacatgtggcaccgtttgcctcaagtacctgctgtttacctacaattgctgcttctggctggctggcctggctgtcatggcagtgggcatctggacgctggccctcaagagtgactacatcagcctgctggcctcaggcacctacctggccacagcctacatcctggtggtggcgggcactgtcgtcatggtgactggggtcttgggctgctgcgccamcttcaaggagcgtcggaacctgctgcgcntgtacttcatcctgctcctcatcawctttcttgctggagatcawcgctggtatcctcgcctacgcctaattaccagcagctgaacacggagntcaaggagaacctgaaaggacaccatggaccaagcgttancaccagccgggccatgaggttgttgaccagcgttttgggaccagttgcagcaggatttccattgttttgggaagcaacaatttacagggtttggcgagacattgagttgantccgttaanaggaggccttggttngttggt

SEQ ID NO: 320 - DNA, 3527 bp, Homo sapiens
  misc feature (94): n equals a,t,g, or c
  misc feature (96): n equals a,t,g, or c
  misc feature (1926): n equals a,t,g, or c
gccggcgtctcctggctgccgtcacttccggttctctgtcagtcgcgagcgaacgaccaagagggtgttcgactgctagagccgagcgaagcgntngcctaaatcaaaggaacttgtttcttcaagctcttctggcagtgattctgacagtgaggttgacaaaaagttaaagaggaaaaagcaagttgctccagaaaaacctgtaaagaaacaaaagacaggtgagacttcgagagccctgtcatcttctaaacagagcagcagcagcagagatgataacatgtttcagattgggaaaatgaggtacgttagtgttcgcgattttaaaggcaaagtgctaattgatattagagaatattggatggatcctgaaggtgaaatgaaaccaggaagaaaaggtatttctttaaatccagaacaatggagccagctgaaggaacagatttctgacattgatgatgcagtaagaaaactgtaaaattcgagccatataaataaaacctgtactgttctagttgttttaatctgtctttttacattggcttttgttttctaaatgttctccaagctattgtatgtttggattgcagaagaatttgtaagatgaatacttttttttaatgtgcattattaaaaatattgagtgaagctaattgtcaactttattaaggattactttgtctgcccaccacctagtgtaaaataaaatcaagtaatacaatcttaactgttgtggccttttttgatcataagagttggtactgtttaaggccaaaagtaacagtttttatagatcttttagtttcaactcagcttttacaataaaaaggatttgtattgcattgagtttataaacttttggtttgtgaacttcatatttgatcttttctcttccaatcaaatgtctaggcttgtttgacttccacccccaatggtttttcactctttttatttacttcattttcctttaataacttaatctcttcatgttcagtttttacttcactctttattcttttctttgattatggtatgcttatttggaaagtcagtgaaactgtcaaaatgttatctcaataagatacttatatgagaactacaatcaccgaatctactgtattcaatattagcagatctaatttgataaacaacatggcttgtgtgaaaactgagcaggtgtttgtttacccatagtgttctgtgtagttattgcttagtctgcagaaaataatgacttagatgagatgtctgacttgctttcacttattaaacatgttcaccatgggatgatgtctgtaacatcagatattgttcaactagactaggatttaataaaaattgtgaaagcttactggcctaacattttattttataatattgggtatgaattatatgtagccagagatgtcattaagctttactgttatagtaggtaatatggttagtttgtagggaaaagagcatatgagcacatgcttgtgtattttggcctttgccccagtagaacagaccaatggcattctagacttgatgatactaagttttagcagacactagtaagtggtttgtatttaaccatactgatgaagcagacagattgaggcacagattttagtggctttgtggcaataaatagggcatggtgtgccttaggaaaagaatgtttataaagggaattataactgaaattaaaggaggcggcagtgaagaggaaataatyctcttctatctaaatgatatacatatgatattttgagatttttataacagcagtggaacacaattctaggtagagtagaaaaaggaaagttttaaagacatataaaagattcttgttgacaaattatttttggtagcaaatctcaaatggttacctgctattaaggtctgccatattagagttttgcactattttgctaccaagtntgattcatacatctaaaacattttgtagttacttgtcaaggacttaatttgaaaatcatttgccaggccacatagttatcaatttttttttctatcagctattctgttgtatttctaaaacattttttagatgactttttaaagtatatttagcagtaaccttatgaggttcaaattggtaaatctcttgtaatttagccttcatcgaataataggtaccagtgtattaaaaatgtgtattttttgcagccccttgaaccagagtaggttcagagaaactcccaaagtttgtactttagacacatcawgcttgattggtaacttccctccttttttggggaacatgtttgtgtcctattaacttaattggatagatttttaaatatttcttatttttggcacacggaaagggtagttcgagtacagaactttgatttttggtgtagatgcagagggaatgatgggtaaatttcctaggtttatgtgaatttagggggtgtatgcattttgaaacaatctactaacagatggtgctgaaatctattacctacatgttttctagttgttcagcattatgttaatgaagcctccatataaggagtgtttctctggcacagttggtaagttgactgctaacttcatttaaatgtgttactggatatgcagtatactgaaattattaatcagtttgtgtataggaaaagagaactgggttaaaagcaaattaacttgttctgaaaagaaagtatagattaattttgttttctgtttaaattttatctccttggtaaagatttttttttcctgggcagaaaacttgggcatttttaggcgtagataccttaccttacaatgccaaaatgaatttaattccagtactcaggtttttccctttaacagactctatgtgtatcagggctttctaatgggtttttcctcttcgtttttaaaatgtgagtagcatttgaccaatttccagtgctcttarcattttacttaaagaacaaccactacaaaagaaaatctttgtaatttgattgtcttttgctttgcttcattaatgcctaagaacttaagaatactcctacctcattagctactcaagatgctgtgacgatcaaatctattctacataatgcgtttagaaacaaagacttgggtgaaaaatgaaataagtatattctgacttggctattgaggggaaaattcagtattaagtgttcctcacaggagatatgttagcagaatactataaaagtttgaaatttttaaaaagtaaaagtacttaaatttaggtatctctcctgaaattctttgcagttcattttttatggcagttaatccagtgaaacactcaaaagtttttttttttttaaaagtgtttttccagataaactgtagggtgaacattcacataatcacaaatatgtaattctgtaattgtggaatgcttgtatgctttgttttcgtacatcttccatggagatgtctgaatataatactccatctgtgaatattttaaatgttgaaataaaagtaagaaatgtgaaaaaaaaaaaaaaaaaaaaaaaaaaaaaaaaaaaaaaaaaaaaaaaaaaaaa

SEQ ID NO: 321 - DNA, 1449 bp, Homo sapiens
aagataataaaaaatatgaaattattaagcgtgatattctccgtggaaagtcagtgccacattatgctgctattgagcctgatggaaatggtctaatgattgtatcctacaagtctttmacatttgttcaggctggtcaagatcttgaagaaaatatggatgaagacrtatcagagaaaatcaaagaacctctgtattactggcaacagactgaagatgatttgacagtaaccatacggcttccagaagacagtactaaggaggacattcaaatacagtttttgcctgatcacatcaacattgtactgaaggatcaccagtttttagaaggaaaactctattcatctattgatcatgaaagcagtacatggataattaaagagagtaatagcttggagatttccttgattaagaagaatgaaggactgacctggccagagctagtaattggagataaacaaggggaacttataagagattcagcccagtgtgctgcaatagctgaacgtttgatgcatttgacctctgaagaactgaatccaaatccagataaagaaaaaccaccttgcaatgctcaagagttagaagaatgtgatattttctttgaagagagctccagtttatgcagatttgatggcaatacattaaaaactactcatgtggtgaatcttggaagcaaccagtaccttttctctgtcatagtggatcctaaagaaatgccctgcttctgtttgcgccatgatgttgatgccctactctggcaaccacactccagcaaacaagatgatatgtgggagcacatcgcaactttcaatgctttaggctatgtccaagcatcaaagagagacaaaaaattttttgcctgtgctccaaattactcgtatgcagccctttgtgagtgccttcgtcgagtattcatctatcgtcagcctgctcccatgtccactgtactttacaacagaaaggaaggcaggcaagtaggacaggttgctaagcagcaagtagcaagcctagaaaccaatgatcctattttaggatttcaggcaacaaatgagagattatttgttcttactaccaaaaacctctttttaataaaagtaaatacagagaattaattattctaacatattggcctctttgtactggaaaagtattcagtggtacctggaggtctggacagttatactgtaacctcttaagttttaatgtgctaaatatatcttgtatgattttttattttttaataacattggaaatatattcaagagattatgattctgtaaagctgtggaatgaagctgcagatttagagaacattggcttctgaaaaaaaaaaagagtgaagatagtactagcaagtatacttattttttaaaacaggctagaatctcatgttttatatgaaagatgtacaattcagtgtttaaaaataaaaatatttattgtgta

SEQ ID NO: 322 - DNA, 777 bp, Homo sapiens
  misc feature (36): n equals a,t,g, or c
  misc feature (752): n equals a,t,g, or c
  misc feature (771): n equals a,t,g, or c
  misc feature (775): n equals a,t,g, or c
ggcggcgatcccggcggagggggccgttcgccagcnctgaggcagaaagtgccacgactccacacgcgcgcacgcagccagcgagcggccggagcggacggcagacggggcgggcggcgtcagggtcgcagcgtctacagctgctcgggggcggtttcttggcggaggcttggccggctcctctctcccggctccgcggcggctgcgaaggcggcggctcctgccctctcgctttccctctcgcgtctctggctgcaggtgaaaggaaagcaagccaggatggatatttacgacactcaaaccttgggggttgtggtctttggaggattcatggttgtttctgccattggcatcttcctggtgtcgactttctccatgaaggaaacgtcatatgaagaagccctagccaaccagcgcaaggagatggcgaaaactcaccaccagaaagtcgagaagaaaaagaaggagaaaacagtggagaagaaaggaaagaccaagaaaaaggaagagaaacctaatgggaagatacctgatcatgatccagcccccaatgtgactgtcctccttcgagaaccagtgcgggctcctgctgtggctgtggctccaaccccagtgcagccccccattatcgttgctcctgtcgscacagttccagccatgccccaggagaagctggcctyctyccccaaggacaaaaagaaraaggaraaaaaagttgcaaaagttggaccagtgtcastctgtagtgattncatccaggtttcaatttgnaagntg

SEQ ID NO: 323 - DNA, 1214 bp, Homo sapiens
  misc feature (1203): n equals a,t,g, or c
ggggagccccgtagaaccgagggggtcggccccagagatcatgctgaactccaagggctataccaagtccatcgacatctggtctgtgggctgcattctggctgagatgctctctaaccggcccatcttccctggcaagcactacctggatcagctcaaccacattctgggcatcctgggctccccatcccaggaggacctgaattgtatcatcaacatgaaggcccgaaactacctacagtctctgccctccaagaccaaggtggcttgggccaagcttttccccaagtcagactccaaagcccttgacctgctggaccggatgttaacctttaaccccaataaacggatcacagtggaggaagcgctggctcacccctacctggagcagtactatgacccgacggatgagccagtggccgaggagcccttcaccttcgccatggagctggatgacctacctaaggagcggctgaaggagctcatcttccaggagacagcacgcttccagcccggagtgctggaggccccctagcccagacagacatctctgcaccctggggcctggacctgcctcctgcctgcccctctcccgccagactgttagaaaatggacactgtgcccagcccggaccttggcagcccaggccggggtggagcatgggcctggccacctctctcctttgctgaggcctccagcttcaggcaggccaaggccttctcctccccacccgccctccccacggggcctcgggagctcaggtggccccagttcaatctcccgctgctgctgctgcgcccttaccttccccagcgtcccagtctctggcagttctggaatggaagggttctggctgccccaacctgctgaagggcagaggtggagggtggggggcgctgagtagggactcagggccatgcctgcccccctcatctcattcaaaccccaccctagtttccctgaaggaacattccttagtctcaagggctagcatccctgaggagccaggccgggccgaatcccctccctgtcaaagctgtcacttcgcgtgccctcgctgcttctgtgtgtggtgagcagaagtggagctggggggcgtggagagcccggcgcccctgccacctccctgacccgtctaatatataaatatagagatgtgtctaaaaaaaaaaaaaaaaaaaaaaaaaaaaaaaaaaaaaaancccgggggggg

SEQ ID NO: 324 - DNA, 1046 bp, Homo sapiens
cacttgtatgccttcttcattcagtggagtccagaaatatatgcagaagatactggcgaatataccagagaacctggatttatagtagtaaaaaagattgaggagtctgaaacaattgaggattctagtaatcaagcagcagccagagaatgggagattactacaagggaagacataaattcaaagcaggttgctacagtgaaagcagacctggagtctgaatcttttcgaccaaacctaagtgatcccagtgaacttttactgccagatcaaattgaaaagcttaccaagcatcttccaccaagaacaattggctatccatggactcttgtttatggtactggaaaacatggcacaagcttgaaaactctttatcgaacaatgacaggtttagacaccccagtgctgatggtgattaaagacagtgatggacaggtttttggtgcgttacatctgarccactgaaagtgagtgatggcttttatggtactggagagacctttgtttttacattctgtccggagtttgaggtctttaagtggacaggagataatatgttttttatcaaaggagacatggattcactagctttcggtggtggaggaggagaatttgcgctttggcttgatggagatctctaccatggaagaagccattcttgtaaaacgtttgggaatcgtacactttctaagaaggaagatttctttatccaagatattgaaatctgggcttttgaataaataaaatgctctctgtcttagcaggagaatggcccaaacctgacatggacaagcattgtttggaaagttcaagaagcaatacagtgtaacatgtcacttgtgctttaaaattagtctgtatcaccatttattacagttataattttggagtttatttttcaaatcatgttcttgtcccagagttctttaggttaacactagggactgcgtccatggtactagtataacagcttgggtttgttagaatttgggcaacattttggattataatgacaacttcattttcacatgttactcagttccccc

SEQ ID NO: 325 - DNA, 674 bp, Homo sapiens
  misc feature (465): n equals a,t,g, or c
  misc feature (666): n equals a,t,g, or c
gaaagcttccagccctcctcccttcaccctggaaatccagacacccccacccccaccctcagatcactttaagataatttctttattcgtttgcccgacagaccatggctccctttggaagaaacttgctaaagactcggcataaaaacagatctccaactaaagacatggattcagaagagaaggaaattgtggtttgggtttgccaagaagagaagyttgtctgtgggctgactaaacgcaccacctctgctgatgtcatccaggctttgcttgaggaacatgaggctacgtttggagagaaacgatttcttctggggaagcccagtgattactgcatcatagagaagtggagaggctccgaaagggttcttcctccactaactagaatcctgaagctttggaaagcgtggggagatgagcagcccmatatgcaatttgttttggttaaagcagatgcttttnttccagttcctttgtggcggacagctgaagccaaattagtgcaaaacacagaaaaattgtgggagctcagcccagcaaacttacatgaagactttaccaccagataaacaaaaaagattagtccagggaaaactttccgggaaactggctaaaatttaggcaggacacattttttcatggttcgggataatatgggggacnttagttcc

SEQ ID NO: 326 - DNA, 357 bp, Homo sapiens
  misc feature (342): n equals a,t,g, or c
  misc feature (354): n equals a,t,g, or c
ggcacgaggtgagagccaggcgtccctctgcctgcccactcagtggcaacacccgggagctgttttgtcctttgtggagcctcagcagttccctctttcagaactcactgccaagagccctraacaggtaatgggatagggatacagattatcctgtgaagtgatatcgatctggaaacaggtctggggagctggaggggctctagtgagggttctgggagggtctggggttagtgtgggggggagcacaggatatacaggtgctaggaaagagcatggagtgacctgcagtgtgggagtcaggctgggtgtgcaggtggaggaacctggggtgttaggatntcagagtgtcangtg

SEQ ID NO: 327 - DNA, 1579 bp, Homo sapiens
  misc feature (969): n equals a,t,g, or c
  misc feature (1413): n equals a,t,g, or c
  misc feature (1574): n equals a,t,g, or c
gggaaagcagcgggaggggcggagggaggggattcggcagctccagttcagctcgctcggcgcacccacgcctcgctgccccgcttcctgccctcaacctgggcatgcgscccccacccttccggccccccagaacccgcgccatcccccggagcctccccagagctggccgcgcaggatgggcgccctcaggcccacgctgctgccgccttcgctgccgctgctgctgctgctaatgctaggaatgggatgctgggcccgggaggtgctggtccccgaggggcccttgtaccgcgtggctggcacagctgtctccatctcctgcaatgtgaccggctatgagggccctgcccagcagaacttcgagtggttcctgtataggcccgaggccccagatactgcactgggcattgtcagtaccaaggatacccagttctcctatgctgtcttcaagtcccgagtggtggcgggtgaggtgcaggtgcagcgcctacaaggtgatgccgtggtgctcaagattgcccgcctgcaggcccaggatgccggcatttatgagtgccacaccccctccactgatacccgctacctgggcagctacagcggcaaggtggagctgagagttcttccagatgtcctccaggtgtctgctgcccccccagggccccgaggccgycaggccccaacctcacccccacgcatgacggtgcatgaggggcaggagctggcactgggctgcctggcgaggacaagcacacagaagcacacacacctggcagtgtcctttgggcgatctgtgcccgaggcaccagttgggcggtcaactctgcaggaagtggtgggaatccggtcagacttggccgtggaggctggagctccctatgctgagcgattggytgcaggggagcttygtctgggcaaggaagggaccgatcggtaccgcatggtagtagggggtgcccaggcaggggnacgcaggcacctaccactgcactgccgctgagtggattcaggatcctgatggcagctgggcccagattgcagagaaaagggccgtcctggcccacgtggatgtgcagacgctgtccagccagctggcagtgacagtggggcctggtgaacgtcggatcggcccaggggagcccttggaactgctgtgcaatgtgtcaggggcacttcccccagcaggccgtcatgctgcatactctgtaggttgggagatggcacctgcgggggcacctgggcccggccgcctggtagcccagctggacacagagggtgtgggcagcctgggccctggctatgagggccgacacattgccatggagaaggtggcatccagaacataccggctacgrctagaggctgccaggcctggtgatgcgggcacctaccgctgcctcgccaaagcctatnttcgagggtctgggacccggcttcgtgaagcagccagtgcccgttcccggcctstccctgtacaygtgcgggaggaaggtgtggtgctggaggctgtggcatggctagcaggaggcacagtgtaccgcggggagacttgcctcccttgcttgtgcaacatnttctt

SEQ ID NO: 328 - DNA, 2272 bp, Homo sapiens
  misc feature (2222): n equals a,t,g, or c
  misc feature (2263): n equals a,t,g, or c
gaaaaagaaacagcacaacttcgagaacaagttgggagaatggaaagagaacttaaccatgagaaagaaagatgtgaccaactgcaagcagaacaaaagggtcttactgaagtaacacaaagcttaaaaatggaaaatgaagagtttaagaagaggttcagtgatgctacatccaaagcccatcagcttgaggaagatattgtgtcagtaacacataaagcaattgaaaaagaaaccgaattagacagtttaaaggacaaactcaagaaggcacaacatgaaagagaacaacttgaatgtcagttgaagacagagaaggatgaaaaggaactttataaggtacatttgaagaatacagaaatagaaaataccaagcttatgtcagaggtccagactttaaaaaatttagatgggaacaaagaaagcgtgattactcatttcaaagaagagattggcaggctgcagttatgtttggctgaaaaggaaaatctgcaaagaactttcctgcttacaacctcaagtaaagaagatacttgttttttaaaggagcaacttcgtaaagcagaggaacaggttcaggcaactcggcaagaagttgtctttctggctaaagaactcagtgatgctgtcaacgtacgagacagaacgatggcagacctgcatactgcacgcttggaaaacgagaaagtgaaaaagcagttagctgatgcagtggcagaacttaaactaaatgctatgaaaaaagatcaggacaagactgatacactggaacacgaactaagaagagaagttgaagatctgaaactccgtcttcagatggctgcagaccattataaagaaaaatttaaggaatgccaaaggctccaaaaacaaataaacaaactttcagatcaatcagctaataataataatgtcttcacaaagaaaacggggaatcagcagaaagtgaatgatgcttcagtaaacacagacccagccacttctgcctctactgtagatgtaaagccatcaccttctgcagcagaggcagattttgacatagtaacaaaggggcaagtctgtgaaatgaccaaagaaattgctgacaaaacagaaaagtataataaatgtaaacaactcttgcaggatgagaaagcaaaatgcaataaatatgctgatgaacttgcaaaaatggagctgaaatggaaagaacaagtgaaaattgctgaaaatgtaaaacttgaactagctgaagtacaggacaattataaagaacttaaaaggagtctagaaaatccagcagaaaggaaaatggaagatggagcagatggtgctttttacccagatgaaatacaaaggccacctgtcagagtcccctcttggggactggaagacaatgttgtctgcagccagcctgctcgaaactttagtcggcctgatggcttagaggactctgaggatagcaaagaagatgagaatgtgcctactgctcctgatcctccaagtcaacatttacgtgggcatgggacaggcttttgctttgattccagctttgatgttcacaagaagtgtcccctctgtgagttaatgtttcctcctaactatgatcagagcaaatttgaagaacatgttgaaagtcactggaaggtgtgcccgatgtgcagcgagcagttccctcctgactatgaccagcaggtgtttgaaaggcatgtgcagacccattttgatcagaatgttctaaattttgactagttactttttattatgagttaatatagtttagcagtaaaaaaaaaaaaaaaaaccacacctaaaatagaccactgaggagaccatagagcggatgctttcatgcaccctttactgcactttctgaccaggagctactttgagtttggtgttactaggatcagggtcagtctttggcttatcaataaattttaatctctgttaatcttacctgctttaaaaaaaagttcttgtgtgttcgtatctttatttattccctagtttgcagaactgtctgaataaaggatacaaggattatttcaatgttactgcactgaaaaacgtgtatgtattagtgtgctagattatttagcagaatattcacaagtttctgttgaccttgttgattgagcatgactactaaatattatgtaataaaaagcatttgtcataacagtcttatgaagtagttcttcgaatatagaaagttctataaatttagcccatgttaatgntgaggtttttaaattttgcagaaatgggagctgcatgtagnaatgagaat

SEQ ID NO: 329 - DNA, 1320 bp, Homo sapiens
  misc feature (1256): n equals a,t,g, or c
  misc feature (1275): n equals a,t,g, or c
  misc feature (1290): n equals a,t,g, or c
  misc feature (1298): n equals a,t,g, or c
  misc feature (1302): n equals a,t,g, or c
caacaccccatctctctctctctaaaaaaagagaactggccgtgagctattgtgcccagctgggatcttgacaaagacactatttctctcctttcacctgtgctgtgtatttttccctcgcctagttcccagacctcactgctatatgtcttctccctggcaggcaggatgacgcaaaacacggtgattgtgaatggagttgctatggcctctaggccatcccagcccacccacgtcaacgtccacatccaccaggagtcagctttgacacaactgctgaaagctggaggttctctgaagaagtttctttttcaccctggggacactgtgccttccacagccaggattggttatgagcagctggctctaggggtgactcagatattgctgggggttgtgagttgtgttcttggagtgtgtctcagcttggggccctggactgtgctgmgtgcctcaggctgtgccttctgggcggggtctgtggtgatcgcagcaggagctggggccattgtccatgagaagcacccgggcaaacttgctggctatatatccagcctgctcaccctgrcaggctttgctacagctatggctgctgttgtcctctgcgtgaatagcttcatctggcaaactgaaccctttttatacatcgacactgtgtgtgatcgctcagaccctgtcttccctaccactgggtacagatggatgcggcgaagtcaagagaaccaatggcagaaggaggagtgtagagcttacatgcagatgctgaggaagttgttcacagcaatccgtgccctgttcctggctgtctgtgtcttgaaggtcattgtgtccttggtttccttgggagtaggtcttcgaaacttgtgtggccagagctcccagcccctgaatgaggaaggatcagagaagaggctactgggggagaattcagtgcccccttcgccctctagggagcagacctccactgccattgtcctgtgagcygccaaagaccccacggggtgcccgcatgtccctgtctagggcagcccagggcccccactcctggctcctcacacttgcctcccctatggccgctctccagaccctcctcctttcttctccccacatccgcacctgctgttcccactctggggttctcaagtccatgaacagatattgttgcattttccacaatgctgattaaacataataaacaatccagaaaagcartttgcccaraaaaaaaaaaaaaaggcgggcgctctaaaaggatncctcgaaggggcccaagcnttaagcgttgcatgngaagtcanaagncttttccctaatagtgaa

SEQ ID NO: 330 - DNA, 1860 bp, Homo sapiens
ttgactttgtagaaattatgttctttcatagtatcttcttctacccgttgcagacgataaattatttgtgccaattcgagaattgctgttaggctgttatcctcccttccttggggctaagaattacaagactcatggcactggcgtaaagttgttgtttatctaatcactgatgaaatattttcacacttgaaaatccccaaatgctttacaatgaatgaagtgttaatttggtgaccaggtggtagccattagccatgttgcaaaattctagacagtaaaacctgtgttttagaaacagaggggaaatttaaataatggagtcctggttagcctttcagggattagggatttgggtttttttttttytctctttttaatactagaatatctcagtttttataaaaggtaagtttaaaatgtttattgtgccattattttaactggcatcttgaaagaacagtaggttttctccatgataaactgattccagtaagaattttcagtacataccaagtacctggaaagttcttcagataagttaatagatccaaggagatacatgcctcagtgagataaactgacctttttactagctaaactatttagccagagcaatactctgtagaactgtgcttttctaaagtaaagattatctgtttctcaattttatgtgcataatacttttcctggtgctagctttgataggcaaaatattttgaaatgttggtcccataatgattgtgctagttcataagctttgttgttatgagtgtaatcataaaaatatttccaagcagtttttgacctttattctacatttctgggcatttgtaatatggtattctactggtatatatttttaaagtttgcgtttagattatggtaaagaaatttcaagcatatttcttctaataaagtattaagacagtgtttcagaatatcaaggcacacctccttagttgttttagattagaactctagaaacaattttgtgaacattgaaagtattttgagttaagcctaagctgattaatcacacaatacatacttttcctgcattttctttcagtgacatttgagaattgggtgacattttaaaatgtgttttataccatttagyttttgcaaacaagttctaaagttttggagaaaaagtgatgtggtcaagagttgaagtctcatatatctttagtagcactcccatgaattatttccgtgacagtaacaagtgtgtgttccatgtctgatttggggcactggttagactgcattaatagctacttgattagaattcgaacttttaaaattttgaaatgtttaagaatgtattagaaaatgcatgctttatgttgaaaaaatacattgctttaatattcctcattcttgagttaagaaatttatgttaattttgcatgggcacaaacttaatcagaaacattttgtggagttacatttcctcttattatttatcaaggttcagtattgatctttgaaaccttggtcccgttaacttactagtcacattgaccaatgttttatagaaatgcctagaattttgagactaatagtagttatccattaacattccaaaagttttgtgctttttaaaatttgttttggtaattatcacatttttttctcttaccttcctttaaatggccacagtgtgtactgctggaatgttccatccaaaagatgtagcttcagaagcacagtgattgccccagggtccatgagatattgtttgtattatgaagttggagtgctgtctactgaaattatactcttaaataaatatgtatgtagtgtgtaatattttctaataaattcttttgataaacwaaaaaaaaaaaaaac

SEQ ID NO: 331 - DNA, 1576 bp, Homo sapiens
agccagcagcgcgtgcctggccgctcctgcgctctcccgcctcccggggctcggaggagccggggcacgttccaggagctgcctagggctgaggttccaggcctgggggtcgcttccagctgccagatcccgtgcagtcctggggaccctgagaagcaccgagccatccctgacccaggaactttccgcagactcgccgccatctgggagtgaagcaacatggatgcagtcagccaagtccccatggaagtcgtgcttcccaagcacatcctggatatctgggttattgtcctcatcatcctggccaccattgtcatcatgacctcgttgttgctgtgcccagccactgcagtaatcatctatcgcatgcggactcatccgatccttagtggggctgtttgagagcctcccaagagggccgggtgagggatgaggacaggcatcctatccccagcctcttcctgtcttcagaaaagcagcaggagggactttggggcatggacctgagttctggttttgattctgccacgagccagctgtgtgaatttggtcaagggacctaactctctgagttccaggttccttatctttcaaatggggatggtgatccctgccctttctacctcatagggatgtgagaaccacctgacttagtggatgtgaaagctgtttgtgatcagtaaagctaccacagatataagggtgttatgctgaatcctgagaagctttcaagaaccagagaacctgattgctgatgatggccttaaaggtggtgagggagatactgggggcagagcagactttgccagtgcccctcaggtcaaaccaagccaagagcaccctgtccccattccaaggggccagcagcactttggcccaaagtattttctttaaggtgccattccttcatgttttctcagtttggagggtgatgggtagagctttccagaaccttctccattccagaatctctgcccctgtgtaatctgaaggaaggctgtgccatctttgggcactgccaagggagttggggtgatgggcttctttctgcactggagtctcacatctgttagctttgacactcaagcaatgttggaaaatgcagggtgactgagttccctgcccagctttcgggatctctggcccccatccccttgtgtgtgtccctctgcccagctcctgctgtaattagctccacgtgtacccccttcactccctcccaccagctctgcagccagcctatggcaattatattttaagaggtgttcccaggacttttgggacctactaaaacaatgatggttattttagatgtgatgatttatatttatgtagagatatttctggaccactcaagctcttcgataccaaaatcaggagcatcttgggatttattaaattatgtaagaagatagcacagatatcgggatattattgtgtgaaaatgctgcttttactttgatgtgatctcattgatgtacacaaccaagttccaataaagtgctagaatgtgaaaaaaaaaaaaaaaaaactgcgagggggggacccgtaaccctaatcgaccttaatgagtgta

SEQ ID NO: 332 - DNA, 576 bp, Homo sapiens
  misc feature (34): n equals a,t,g, or c
  misc feature (467): n equals a,t,g, or c
  misc feature (556): n equals a,t,g, or c
  misc feature (567): n equals a,t,g, or c
tcagaaaagtccacagaacacccagagaagaccncggcaaccacagagaaaaccacaagaaccccagaaaagcctacgctatactcagagaagaccatatgcaccaaagggaaaaacacaccagtcccagaaaagcctacagaaaacctggggaacaccacactgaccactgagaccataaaagccccagtaaagtccacagaaaacccagaaaaaacagcagcagtcacaaagactataaaaccttcagtcaaggtcacaggagacaaatctctcactactacctcttctcatctaaataaaactgaagttactcatcaggtgcccactggttctttcaccctcattacatctagaacgagctgagttctatcacatcagaagccacagggaaacgagagccatccatacctcaataaagatggctcacagaaaggtatccacgctggacagatgggagagaatgnattcattccctgcatgggccatagttattgtgggtcctggtggctgtgattctcctcctggtgttccttggcctgatcttcttggtctnctatatgatgnggacaggcg

SEQ ID NO: 333 - DNA, 1311 bp, Homo sapiens
  misc feature (743): n equals a,t,g, or c
  misc feature (764): n equals a,t,g, or c
  misc feature (1221): n equals a,t,g, or c
  misc feature (1245): n equals a,t,g, or c
  misc feature (1254): n equals a,t,g, or c
  misc feature (1273): n equals a,t,g, or c
ggccaggtaccagacagcctgtgaacaaccggggcagaagtggcaatgcattgaggatacatctggcaagcttcgaattcacaagtgtaaaggacccagtgacctgctcacagtccggcagagcacgcggaacctctacgctcgcggcttccatgacaaagacaaagagtgcagttgtagggagtctggttaccgtgccagcagaagccaaagaaagagtcaacggcaattcttgagaaaccaggggactccaaagtacaagcccagatttgtccatactcggcagacacgttccttgtccgtcgaatttgaaggtgaaatatatgacataaatctggaagaagaagaagaattgcaagtgttgcaaccaagaaacattgctaagcgtcatgatgaaggccacaaggggccaagagatctccaggcttccagtggtggcaacaggggcaggatgctggcagatagcagcaacgccgtgggcccacctaccactgtccgagtgacacacaagtgttttattcttcccaatgactctatccattgtgagagagaactgtaccaatcggccagagcgtggaaggaccataaggcatacattgacaaagagattgaagctctgcaagataaaattaagaatttaagagaagtgagaggacatctgaagagaaggaagcctgaggaatgtagctgcagtaaacaaagctattacaataaagagaaaggtgtaaaaaagcaagagaaanttaaagagccatyttcacccnttcaaggaggctgytcaggaagtagatagcaaactgcaacttttcaaggagcaacaaccgtmggaggaagcaaggagaggaaggagaagagacggcagaggaagggggaagagtgcagcctgcctggcctcacttgcttcacgcatgacaacaaccactggcagacagccccgttctggaacctgggatctttctgtgcttgcacgagttctaacaataacacctactggtgtttgcgtacagttaatgagacgcataattttcttttctgtgagtttgctactggctttttggagtattttgatatgaatacagatccttatcagctcacaaatacagtgcacacggtagaacgaggcattttgaatcagctacacgtacaactaatgggagctcagaagctgtcaagggtataagcagtgcaaccccaagaccttaagaatcttggatgttggtnaagggaaaaaaataccatttttcnaatttaccngggaaaattccttgtggtnacggagctttctggcctgggaaacatttaattgcacag

SEQ ID NO: 334 - DNA, 1118 bp, Homo sapiens
  misc feature (10): n equals a,t,g, or c
  misc feature (1115): n equals a,t,g, or c
  misc feature (1117): n equals a,t,g, or c
  misc feature (1118): n equals a,t,g, or c
tcgacccacncgtccggtctcaaaaaaaaaaaaaaaagatgtcctcttggccttacttccagccctttgactcactatctaccagtttggttttagtttgtctttgtcagcgccacgtgagacacctacaacgagatgccttaagccagctcatgaatggccccatcagaaagaagctcaaaattattcctgaggatcaatcctggggaggccaggctaccaacgtctttgtgaacatggaggaggacttcatgaagccagtcattagcattgtggacgagttgctggaggcagggatcaacgtgacggtgtataatggacagctggatctcatcgtagataccatgggtcaggaggcctgggtgcggaaactgaagtggccagaactgcctaaattcagtcagctgaagtggaaggccctgtacagtgaccctaaatctttggaaacatctgcttttgtcaagtcctacaagaaccttgctttctactggattctgaaagctggtcatatggttccttctgaccaaggggacatggctctgaagatgatgagactggtgactcagcaagaataggatggatggggctggagatgagctggtttggccttggggcacagagctgagctgaggccgctgaagctgtaggaagcgccattcttccctgtatctaactggggctgtgatcaagaaggttctgaccagcttctgcagaggataaaatcattgtctctggaggcaatttggaaattatttctgcttcttaaaaaaacctaagattttttaaaaaattgatttgttttgatcaaaataaaggatgataatagatattattttttcttatgacagaagcaaatgatgtgatttatagaaaaactgggaaatacaggtacccaaagagtaaatcaacatctgtatacccccttcccaggggtaagcactgttaccaatttagcatatgtccttgcagaatttttttttctatatatacatatatattttttaccaaaatgaatcattactctatgttgttttactatttgtttgacatatcagtatatctgaaacaccttttcatgtcaataaatgttcttctctaacattttwaaaaaaaanann

SEQ ID NO: 335 - DNA, 2266 bp, Homo sapiens
gggcacaggccctggctgggaggtggggcgggcaggagccagcctggaggaggggctgagagtcagcaggcacacggkaacccggaaccctgtgtgctggggaggaatcccgcagtggccggggggcttgtaggccgctgctttgtctcttcgtccagagccttatgtaagagcttttctcgggaaacaggaagtcctgcttgccaatttcagcacagggagtagtgcaggccttattccaacacacccggcccagccttaaccccagaactcagccagtttcttgcttccgtgcccctggttctcctccccatcgagcccacccctcctttcccaccttcagtcacccctagtgaactgccccagcgatctctgctgtgcttgaccccgagggtcttccaccctcgccctgaccctggacactgcccagcttggccccccatcctgctcctggcacaatgccctctagccagccaaccttccctcccccaaccctggggccgccccagggttcctgcgcactgcctgttcctcctgggtgtcactggcagccctgtccttcctagagggactggaacctaattctcctgaggctgagggagggtggagggtctcaaggcaacgctggccccacgacggagtgccaggagcactaacagtacccttagcttgctttcctcctccctcctttttattttcaagttcctttttatttctccttgcgtaacaaccttcttcccttctgcaccactgcccgtacccttacccgccccgccacctccttgctaccccactcttgaaaccacagctgttggcagggtccccagctcatgccagcctcatctcctttcttgctagcccccaaagggcctccaggcaacatggggggcccagtcagagagccggcactctcagttgccctctggttgagttggggggcagctctgggggccgtggcttgtgccatggctctgctgacccaacaaacagagctgcagagcctcaggagagaggtgagccggctgcaggggacaggaggcccctcccagaatggggaagggtatccctggcagagtctcccggagcagagttccgatgccctggaagcctgggagartggggagagatcccggaaaaggagagcagtgctcacccaaaaacagaagaagcagcactctgtcctgcacctggttcccattaacgccacctccaaggatgactccgatgtgacagaggtgatgtggcaaccagctcttaggcgtgggagaggcctacaggcccaaggatatggtgtccgaatccaggatgctggagtttatctgctgtatagccaggtcctgtttcaagacgtgactttcaccatgggtcaggtggtgtctcgagaaggccaaggaaggcaggagactctattccgatgtataagaagtatgccctcccacccggaccgggcctacaacagctgctatagcgcaggtgtcttccatttacaccaaggggatattctgagtgtcataattccccgggcaagggcgaaacttaacctctctccacatggaaccttcctggggtttgtgaaactgtgattgtgttataaaaagtggctcccagcttggaagaccagggtgggtacatactggagacagccaagagctgagtatataaaggagagggaatgtgcaggaacagaggcgtcttcctgggtttggctccccgttcctcacttttcccttttcattcccaccccctagactttgattttacggatatcttgcttctgttccccatggagctccgaattcttgcgtgtgtgtagatgaggggcgggggacgggcgccaggcattgtycagacctggtcggggcccactggaagcatccagaacagcaccaccatctagcggccgctctagaggatccctcgaggggcccaagcttacgcgtgcatgcgacgtcatagctctctccctatagtgagtcgtattataagctagcttgggatctttgtgaaggaaccttacttctgtggtgtgacataattggacaaactacctacagagatttaaagctctaaggtaaatataaaatttttaagtgtataatgtgttaaactagctgcatatgcttgctgcttgagagtttggcttactgagtatgattatgaaaatattatwcacaggagstagtgatctatgttggttttagatcaagccaaggtcattcaggcctcagctcaagctgtcatgatcatatcagcatacaattgtgag

SEQ ID NO: 336 - DNA, 1132 bp, Homo sapiens
  misc feature (214): n equals a,t,g, or c
ggcacgaggttaagggtggctttagaggctcagtccccgcgacgccgcgctggttggtgctcctgcgccggaggagttctgcgtctcggggtggtgactgggtccagaatggcttcggattcggggaaccaggggaccctctgcacgttggagttcgcggtgcagatgacctgtcagagctgtgtggacgcggtgcgcaaatccctgcaagggntggcaggtgtccaggatgtggaggtgcacttggaggaccagatggtcttggtacacaccactctacccagccaggaggtgcaggctctcctggaaggcacggggcggcaggcggtactcaagggcatgggcagcggccagttgcagaatctgggggcagcagtggccatcctgggggggcctggcaccgtgcagggggtggtgcgcttcctacagctgacccctgagcgctgcctcatcgagggaactattgacggcctggagcctgggctgcatggactccacgtccatcagtacggggaccttacaaacaactgcaacagctgtgggaatcactttaaccctgatggagcatctcatgggggcccccaggactctgaccggcaccgcggagacctgggcaatgtccgtgctgatgctgacggccgcgccatcttcagaatggaggatgagcagctgaaggtgtgggatgtgattggccgcagcctgattattgatgagggagaagatgacctgggccggggaggccatcccttatccaagatcacagggaactccggggagaggttggcctgtggcatcattgcacgctccgctggccttttccagaaccccaagcagatctgctcttgcgatggcctcaccatctgggaggagcgaggccggcccatcgctggcaagggccgaaaggagtcagcgcagccccctgcccacctttgagcaggacctcaccttggctctgttgctgtcctccagggcgagcactttccacttccagagggggccagagggactttgcctgcccagtctttggagagctcagtacagggcaggagctgctgtggtgttcccttggcaaatgaaagttttattttcgtttgggaaaaaaaaaaaaaaaaaaaaaaaaaaaaaaaaaaaa

SEQ ID NO: 337 - DNA, 2229 bp, Homo sapiens
  misc feature (2208): n equals a,t,g, or c
  misc feature (2216): n equals a,t,g, or c
gtcacgggaactgcccttgctacttgtgacctgccctttactcagcagtttttgttctgggaagccctgggattctgctaatacctatcactgtaggtgctgaagggaaacagatgaagaacatgacctcaaggagcttcctgtcaatgagaagaccaagctgacgcctggcaaagatattaaagaggagcctgaaactgttccttggacatcttatgaatgtcagaaaataccttttggagggttagaagatcaggggacatggttgttcacatttgctgccacggaacaccgccagtcttcacttggaaacagaatcacgccttgtgaagagatcatccctaagcaggagagaagctactaaaggattgtgtcctcctccaccttccctgtgctcggtctccacctgtctcccattctgtgacgatggttcaatggaagagactctgccagctgcattacttgtgggctctgggctgctatatgctgctggccactgtggctctgaaactttctttcargttgaagtgtgactctgaccacttgggtctggagtccagggaatctcaaagccagtactgtaggaatatcttgtataatttcctgaaacttccagcaaagaggtctatcaactgttcaggggtcacccgaggggaccaagaggcagtgcttcaggctattctgaataacctggaggtcaagaagaagcgagagcctttcacagacacccactacctctccctcaccagagactgtgagcacttcaaggctgaaaggaagttcatacagttcccactgagcaaagaagaggtggagttccctattgcatactctatggtgattcatgagaagattgaaaactttgaaaggctactgcgagctgtgtatgcccctcagaacatatactgtgtccatgtggatgagaagtccccagaaactttcaaagaggcggtcaaagcaattatttcttgcttcccaaatgtcttcatagccagtaagctggttcgggtggtttatgcctcctggtccagggtgcaagctgacctcaactgcatggaagacttgctccagagctcagtgccgtggaaatacttcctgaatacatgtgggacggactttcctataaagagcaatgcagagatggtccaggctctcaagatgttgaatgggaggaatagcatggagtcagaggtacctcctaagcacaaagaaacccgctggaaatatcactttgaggtagtgagagacacattacacctaaccaacaagaagaaggatcctcccccttataatttaactatgtttacagggaatgcgtacattgtggcttcccgagatttcgtccaacatgttttgaagaaccctaaatcccaacaactgattgaatgggtaaaagacacttatagcccagatgaacacctctgggccacccttcagcgtgcacggtggatgcctggctctgttcccaaccaccccaagtacgacatctcagacatgacttctattgccaggctggtcaagtggcagggtcatgagggagacatcgataagggtgctccttatgctccctgctctggaatccaccagcgggctatctgcgtttatggggctggggacttgaattggatgcttcaaaaccatcacctgttggccaacaagtttgacccaaaggtagatgataatgctcttcagtgcttagaagaatacctacgttataaggccatctatgggactgaactttgagacacactatgagagcgttgctacctgtggggcaagagcatgtacaaacatgctcagaacttgctgggacagtgtgggtgggagaccagggctttgcaattcgtggcatcctttaggataagagggctgctattagattgtgggtaagtagatcttttgccttgcaaattgctgcctgggtgaatgctgcttgttctctcacccctaaccctagtagttcctccactaactttctcactaagtgagaatgagaactgctgtgatagggagagtgaaggagggatatgtggtagagcacttgatttcagttgaatgcctgctggtagcttttccattctgtggagctgccgttcctaataattccaggtttggtagcgtggaggagaactttgatggaaagagaaccttcccttctgtactgttaacttaaaaataaatagctcctgattcaaagtaarraaaaanaaaaaaanaaaaaaaactcga

SEQ ID NO: 338 - DNA, 3728 bp, Homo sapiens
  misc feature (3707): n equals a,t,g, or c
  misc feature (3713): n equals a,t,g, or c
gaaagacgggaaaggaggagtccagtgctggaggggcagggacggcggcggcgcactcggaacccgccaggtccagggtccaggttccagcgcccggcggcccagcaggcaccccccgagcccagctccacacaccgttcctggatctcctctccccaggcggasgtgcccctgcccagtccagtgaccttcgcctgttggagccctggttaatttttgcccagtctgcctgttgtggggctcctcccctttggggatataagcccggcctggggctgctccgttctctgcctggcctgaggctccctgagccgcctccccaccatcaccatggccaagggcttctatatttccaagtccctgggcatcctggggatcctcctgggcgtggcagccgtgtgcacaatcatcgcactgtcagtggtgtactcccaggagaagaacaagaacgccaacagctcccccgtggcctccaccaccccgtccgcctcagccaccaccaaccccgcctcggmcaccaccttggaccaaagtaaagcgtggaatcgttaccgcctccccaacacgctgaaacccgattcctaccgggtgacgctgagaccgtacctcacccccaatgacaggggcctgtacgtttttaagggctccagcaccgtccgtttcacctgcaaggaggccactgaygtcatcatcatccacagcaagaagctcaaytacaccctcagccaggggcacagggtggtcctgcgtggtgtgggaggctcccagccccccgacattgacaagactgagctggtggagcccaccgagtacctggtggtgcacctcaagggctccctggtgaaggacagccagtatgagatggacagcgagttcgagggggagttggcagatgacctggcgggcttctaccgcagcgagtacatggagggcaatgtcagaaaggtggtggccactacacagatgcaggctgcagatgcccggaagtccttcccatgcttcgatgagccggccatgaaggccgagttcaacatcacgcttatccaccccaaggacctgacagccctgtccaacatgcttcccaaaggtcccagcaccccacttccagaagaccccaactggaatgtcactgagttccacaccacgcccaagatgtccacgtacttgctggccttcattgtcagtgagttcgactacgtggagaagcaggcatccaatggtgtcttgatccggatctgggcccggcccagtgccattgcggcgggccacggcgattatgccctgaacgtgacgggccccatccttaacttctttgctggtcattatgacacaccctacccactcccaaaatcagaccagattggcctgccagacttcaacgccggcgccatggagaactggggactggtgacctaccgggagaactccctgctgttcgaccccctgtcctcctccagcagcaacaaggagcgggtggtcactgtgattgctcatgagctggcccaccagtggttcgggaacctggtgaccatagagtggtggaatgacctgtggctgaacgagggcttcgcctcctacgtggagtacctgggtgctgactatgcggagcccacctggaacttgaaagacctcatggtgctgaatgatgtgtaccgcgtgatggcagtggatgcactggcctcctcccacccgctgtccacacccgcctcggagatcaacacgccggcccagatcagtgagctgtttgacgccatctcctacagcaagggcgcctcagtcctcaggatgctctccagcttcctgtccgaggacgtattcaagcagggcctggcgtcctacctccacacctttgcctaccagaacaccatctacctgaacctgtgggaccacctgcaggaggctgtgaacaaccggtccatccaactccccaccaccgtgcgggacatcatgaaccgctggaccctgcagatgggcttcccggtcatcacggtggataccagcacggggaccctttcccaggagcacttcctccttgaccccgattccaatgttacccgcccctcagaattcaactacgtgtggattgtgcccatcacatccatcagagatggcagacagcagcaggactactggctgatagatgtaagagcccagaacgatctcttcagcacatcaggcaatgagtgggtcctgctgaacctcaatgtgacgggctattaccgggtgaactacgacgaagagaactggaggaagattcagactcagctgcagagagaccactcggccatccctgtcatcaatcgggcacagatcattaatgacgccttcaacctggccagtgcccataaggtccctgtcactctggcgctgaacaacaccctcttcctgattgaagagagacagtacatgccctgggaggccgccctgagcagcctgagctacttcaagctcatgtttgaccgctccgaggtctatggccccatgaagaactacctgaagaagcaggtcacacccctcttcattcacttcagaaataataccaacaactggagggagatcccagaaaacctgatggaccagtacarcgaggttaatgccatcagcaccgcctgctccaacggagttccagagtgtgaggagatggtctctggccttttcaagcagtggatggagaaccccaataataacccgatccaccccaacctgcggtccacygtctactgcaacgctatcgcccagggcggggaggaggagtgggacttcgcctgggagcagttccgaaatgccacactggtcaatgaggctgacaagctccgggcagccctggcctgcagcaaagagttgtggatcctgaacaggtacctgagctacaccctgaacccggacttaatccggaagcaggacgccacctctaccatcatcagcattaccaacaacgtcattgggcaaggtctggtctgggactttgtccagagcaactggaagaagctttttaacgattatggtggtggctcgttctccttctccaacctcatccaggcagtgacacgacgattctccaccgagtatgagctgcagcagctggagcagttcaagaaggacaacgaggaaacaggcttcggctcaggcacccgggccctggagcaagccctggagaagacgaaagccaacatcaagtgggtgaaggagaacaaggaggtggtgctccagtggttcacagaaaacagcaaatagtccccagcccttgaagtcacccggccccsatgcaaggtgcccacatgtgtccatcccagcggctggtgcagggcctccattcctggagcccgaggcaccagtgtcctcccctcaaggacaaagtctccagcccacgttctctctgcctgtgagccagtctagttcctgatgacccaggctgcctgagcacctcccagcccctgcccctcatgccaaccccgccctaggcctggcatggcacctgtcgcccagtgccctggggctgatctcagggaagcccagctccagggccagatgagcagaagctctcgatggacaatgaacggccttgctgggggccgccctgtaccctctttcacctttccctaaagaccctaaatctgaggaatcaacagggcagcagatctgtatatttttttctaagagaaaatgtaaataaaggatttctagatgaaaaaaaaaaaaaaaaaggnggccgntttaaaggatccaag

SEQ ID NO: 339 - DNA, 2674 bp, Homo sapiens
  misc feature (20): n equals a,t,g, or c
  misc feature (2646): n equals a,t,g, or c
  misc feature (2652): n equals a,t,g, or c
  misc feature (2653): n equals a,t,g, or c
  misc feature (2666): n equals a,t,g, or c
ccggcggccaatagccaggncgcggcccgtcccgtcgcctcccctcggggagcctataaggcctccgcaacgccccgggcgcctgctgctccgtacctccaccgacgacctcactcagctgcgttacgcgccgctccggctgccggccgcgcgccttgcccgccggctcccgcccgcaatcggcggctcagggcggacccgggtctctgcgttctcgcgagaagcgcggcgctgcggggccgtgggcgcctgagcccgcgcggccctcgagggccgaatatggggggatgcacggtgaagcctcagctgctgctcctggcgctcgtcctccacccctggaatccctgtctgggtgcggactcggagaagccctcgagcatccccacagataaattattagtcataactgtagcaacaaaagaaagtgatggattccatcgatttatgcagtcagccaaatatttcaattatactgtgaaggtccttggtcaaggagaagaatggagaggtggtgatggaattaatagtattggagggggccagaaagtgagattaatgaaagaagtcatggaacactatgctgatcaagatgatctggttgtcatgtttactgaatgctttgatgtcatatttgctggtggtccagaagaagttctaaaaaaattccaaaaggcaaaccacaaagtggtctttgcagcagatggaattttgtggccagataaaagactagcagacaagtatcctgttgtgcacattgggaaacgctatctgaattcaggaggatttattggctatgctycatatgtcaaccgtatagttcaacaatggaatctccaggataatgatgatgatcagctcttttacactaaagtttacattgatccactgaaaagggaagctattaacatcacattggatcacaaatgcaaaattttccagaccttaaatggagctgtagatgaagttgttttaaaatttgaaaatggcaaagccagagctaagaatacattttatgaaacattaccagtggcaattaatggaaatggacccaccaagattctcctgaattattttggaaactatgtacccaattcatggacacaggataatggctgcactctttgtgaattcgatacagtcgacttgtctgcagtagatgtccatccaaacgtatcaataggtgtttttattgagcaaccaaccccttttctacctcggtttctggacatattgttgacactggattacccaaaagaagcacttaaactttttattcataacaaagaagtttatcatgaaaaggacatcaaggtattttttgataaagctaagcatgaaatcaaaactataaaaatagtaggaccagaagaaaatctaagtcaagcggaagccagaaacatgggaatggacttttgccgtcaggatgaaaagtgtgattattactttagtgtggatgcagatgttgttttgacaaatccaaggactttaaaaattttgattgaacaaaacagaaagatcattgctcctcttgtaactcgtcatggaaagctgtggtccaatttctggggagcattgagtcctgatggatactatgcacgatctgaagattatgtggatattgttcaagggaatagagtaggagtatggaatgtcccatatatggctaatgtgtacttaattaaaggaaagacactccgatcagagatgaatgaaaggaactattttgttcgtgataaactggatcctgatatggctctttgccgaaatgctagagaaatgactttacaaagggaaaaagactcccctactccggaaacattccaaatgctcagccccccaaagggtgtatttatgtacatttctaatagacatgaatttggaaggctattatccactgctaattacaatacttcccattataacaatgacctctggcagatttttgaaaatcctgtggactggaaggaaaagtatataaaccgtgattattcaaagattttcactgaaaatatagttgaacagccctgtccagatgtcttttggttccccatattttctgaaaaagcctgtgatgaattggtagaagaaatggaacattacggcaaatggtctgggggaaaacatcatgatagccgtatatctggtggttatgaaaatgtcccaactgatgatatccacatgaagcaagttgatctggagaatgtatggcttcattttatccgggagttcattgcaccagttacactgaaggtctttgcaggctattatacgaagggatttgcactactgaattttgtagtaaaatactcccctgaacgacagcgttctcttcgtcctcatcatgatgcttctacatttaccataaacattgcacttaataacgtgggagaagactttcagggaggtggttgcaaatttctaaggtacaattgctctattgagtcaccacgaaaaggctggagcttcatgcatcctgggagactcacacatttgcatgaaggacttcctgttaaaaatggaacaagatacattgcagtgtcatttatagatccctaagttatttacttttcattgaattgaaatttattttgggtgaatgactggcatgaacacgtctttgaagttktggtgggggcctttttgggnaaaagnnaaaaaaaaggggnaaaaattt

SEQ ID NO: 340 - DNA, 1457 bp, Homo sapiens
  misc feature (380): n equals a,t,g, or c
  misc feature (1457): n equals a,t,g, or c
gctttgcaccaccctttggcttcatggagctcaactactccttggtgcagaaggtcgtgacacgcttccctccagtgccccagcagcagctgctcctggccagcctccccgctgggagcctccggtgcatcacctgtgccgtggtgggcaacgggggcatcctgaacaactcccacatgggccaggagatagacagtcacgactacgtgttccgattgagcggagctctcattaaaggctacgaacaggatgtggggactcggacatccttctacggctttaccgccttctccctgacccagtcactccttatattgggcaatcggggtttcaagaacgtgcctcttggraaggacgtccgctacttggacttcytggangcacccgggaatatgaagtggctggagcactgcttatgaaatcagacggtgatgtcawaaaaccttttctggttcaggcacagrccccaggaagcttttcgggaagccctgcacatggacaggtacctgttgctgcacccagactttctccgatacatgaagaacaggtttctgaggtctaagaccctggatggtgcccactggaggatataccgccccaccactggggccctcctgctgctcactgcccttcagctctgtgaccaggtgagtgcttatggcttcatcactgagggccatgagcgcttttctgatcactactatgatacatcatggaagcggctgatcttttacataaaccatgacttcaagctggagagagaagtctggaagcggctacacgatgaagggataatccggctgtaccagcgtcctggtcccggaactgccaaagccaagaactgaccggggccagggctgccatggtctccttgcctgctccaaggcacaggatacagtgggaatcttgagactctttggccatttcccatggctcagactaagctccaagcccttcargagttccaagggaacacttgaaccatggacaagactctctcaagatggcaaatggctaattgaggttctgaagttcttcagtacattgctgtaggtcctgaggccagggatttttaattaaatggggtgatgggtggccaataccacaattcctgctgaaaaacactcttccagtccaaaagcttcttgatacagaaaaaagagcctggatttacagaaacatatagatctggtttgaattccagatcgagtttacagttgtgaaatcttgaaggtattacttaacttcactacagattgtctagaagacctttctaggagttatctgattctagaagggtctatacttgtccttgtctttaagctatttgacaactctacgtgttgtagaaaactgataataatacaaatgattgttgtccatggaaaggcaaataaattttctacagtgaaaaaaaaaaaaaaaaaaaaaaaaaaaaaaaaaaaaaaaaaaaaaan

SEQ ID NO: 341 - DNA, 3399 bp, Homo sapiens
  misc feature (2512): n equals a,t,g, or c
tcttcctctctgtttgcttatggcacaacagagaaatggggtaatttttcaggagggtggagagaaacacttgaaacttgtggggaaactctatgaccagtgtcatgacaccctagtacagtttggtggatttttagcatcaaatctaagtacagaagattatataaaacgagtgccttcaattgatgtgctctgtaatgagtttcatacaccacacgatgcagcatttttyctgtctaggccaatgtatgcmcaycatatttcgtcaaartaygatgaacttaaaaaatcagaaaagggaagtaaacagcaacataaagttcataagtacattacatcatgtgagatggtgatggcgcctgtccatgaagcagtggtctccttacatgtttccaaagtctgggatgacatcagccctcaattctatgctacattctggtcattgacaatgtatgaccttgcagttccacacaccagctatgaacgagaagtcaataaacttaaagtccagatgaaagcaattgatgacaatcaggaaatgcccccaaataaaaagaaaaaagagaaggagcgctgtactgcccttcaggacaagcttcttgaagaagaaaagaaacagatggaacatgtacagagagttctacagagattgaaactggaaaaggacaactggcttttagcaaaatctaccaaaaatgagaccatcacaaaatttctacagctgtgtatatttcctcgatgtattttttcagcaattgatgctgtttactgtgctcgttttgttgaattggtacatcaacagaaaactccaaatttttccacacttctttgctatgatcgagttttctctgacataatttacacagttgcaagctgtactgaaaatgaagccagtcgatacggaaggtttctttgctgcatgttagagactgtgaccaggtggcatagtgatagagccacatatgaaaaggaatgtggaaactatccaggattccttaccatattacgggcaactggatttgatggtggaaataaggctgatcaattagactatgaaaattttcgacatgttgtacataaatggcattacaaactaaccaaggcatcggtacattgccttgaaacaggcgaatatactcacatcaggaatatcttgattgtgctaacaaaaatacttccttggtacccaaaagttttgaatctgggtcaagctttggaaagaagagtacacaaaatctgccaagaagaaaaagagaagaggccagatctatatgcattggctatgggctactctgggcagttgaaaagtagaaagtcatacatgatacctgaaaatgagtttcatcacaaagacccccctccgaggaatgcagttgccagtgtgcaaaatgggcctggtggtgggccttcttcatcatcaataggaagtgcatctaaatcggatgaaagcagtactgaggagactgataaatcaagggagagatctcagtgtggtgtgaaagctgttaataaagcttctagtaccacacctaaagggaattcaagcaatggaaatagtggctctaacagcaacaaagctgttaaagaaaatgacaaagaaaaagggaaagagaaagaaaaagagaaaaaagaaaagactccagctactactccagaggccagggtacttggtaaagatggtaaagaaaaaccaaaggaagagcggccaaataaagatgaaaaagcaagagagaccaaggtaaagaacgccgaagtctgacaaagagaaagaaaaattcaagaaggaagaaaaagctaaagatgagaaatttaagaccactgtccccaacgtagaatcaaaatcaactcaagaaagggaaagagagaaggagccatccagagaaagagatatagcaaaggaaatgaaatcaaaggaaaatgttaaaggaggagaaaaaacaccagtttctgggtccttgaaatcacctgttcccagatcagatattccagagcctgaaagggaacaaaaacgccgcaaaattgatactcacccttctccatcacattcctccacagtaaaggacagtctcatcgaactcaaggaatcttcagcaaagctctacattaatcatactcctccaccactgtccaagagtaaggagagagaaatggacaagaaagatttggacaagtcaagggaaagatccagagaaagagagaaaaaagatgaaaaggacaggaaagagcggaaaagggatcactcaaacaacgaccgtgaagtgccaccggacttaaccaagagacgtaaagaggagaatggaacaatgggggtttcaaaacataaaagtgaaagtccttgtgaatctccttatccaaatgagaaagacaaggaaaaaaataagtcaaaatcttcaggcaaagaaaaaggcagtgattcatttaaatctgagaagatggataaaatctcctccggtggcaaaaaggagtccaggcatgataaagaaaagatagaaaagaaagagaaacgggacanttcaggaggaaaggaagagaagaaacatcataagtcctcggacaagcacagatwatgaagactttccatcaaggtgagatcggactggaactgttcggctgcgaccagaaatttattttcctgagtaaattgccgagaattaagaatgaagagggccatttgcatctccttaaattattcagttacctgctttattgctccatgtggaaaacttaaaattgttaagttgtgcattactgtattttaacttgttgcttagtttctacatgtttattttcagtaatggctgaaagtgttaactgttccatacttttagcacaatgtgctgcataaggttacctgtgtacagagttttactttagattaactaaatattgcctgggttcagtttttatttccattctgaaatgcttcctttttattgtttgaaactgaaaataaacaattgttgaacccttttgattttacctcattttaaaactgttttaatttattatttggcttgttcttaatattagtcactaaaagcagtgggagcattgtcttatgaaatgcttaggaatcattttatatagtacatgtacaacattaaacgtgtttaaaaaagaaaaaggtaccagcgatcacttgtcccttgccattttttcttgtaattatgttagacaaatcttggcggcggggggatcaaaacataattgttttaattctacagctgtaggagctttgtattgctgaactttcatctggaaaagtttcacagtgacatttttaaaagagaatttttttatctgccgaattctaccagtgtaaccttttttctaaataaacaatagttttctcaaaaaaaaaaaaaaaaaaaaacaaaaaaaaaaaaaaaaaaattactg

SEQ ID NO: 342 - DNA, 1929 bp, Homo sapiens
  misc feature (9): n equals a,t,g, or c
  misc feature (14): n equals a,t,g, or c
  misc feature (1894): n equals a,t,g, or c
  misc feature (1913): n equals a,t,g, or c
  misc feature (1918): n equals a,t,g, or c
gcctcgcgntactntggggggatggttccatcatggcgtcaatgcagaaacgactacagaaagaactgttggctttgcaaaatgacccacctcctggaatgaccttaaatgagaagagtgttcaaaattcaattacacagtggattgtagacatggaaggtgcaccaggtaccttatatgaaggggaaaaatttcaacttctatttaaatttagtagtcgatatccttttgactctcctcaggtcatgtttactggtgaaaatattcctgttcatcctcatgtttatagcaatggtcatatctgtttatccattctaacagaagactggtccccagcgctctcagtccaatcagtttgtcttagcattattagcatgctttccagctgcaaggaaaagagacgaccaccggataattctttttatgtgcgaacatgtaacaagaatccaaagaaaacaaaatggtggtatcatgatgatacttgttgatgccactgttatcatcctcctagcagaagatagtcctactgagaaaatgagcactttgatcattcagtctttgaactttaacctttgactggaagtgacctataggcaatgaagactacttccttttactgcatttttactcgtgtgcattctgggcgcatgttgatcgctggttcagtccaggcaactgacatgcttttattagtcatacagtattaatgcaggtgtcaggaaatgtcaaatataattccattttttatttttatttttttaagcttttggaaaagctccaggtcctcatgtattgtgcaataacaatgacttccttggcggttttggtacgttcattgccggcaatgggcgttgtaacaggaaaagttttcattaactcctgccattcaatgattaatgcatgatagggcctatgaaatgaacttactggttatagtgggaatataaataaagtgagggatccaacattactttaaaagtcaccccaactgtttatatttggattctatgcactgtgatcctaaggttaacagcatgaattaacatgcgtctttaaaggactgtaatgaaagatcattgcatatttattgaattgtttatatctactgtcaagttgttttgacatggaagattttcaagtaacattggcagagaggtacagtatgttatccctatggtgaaaataaattaatttgttgtatatagttcctcaatctctgaagtaaaggtatgagtaatatagggtatgaatggtttaatcaaggctttattttggaagtaagaaaaatggcagtgatgattaaattgctgcagtccataatttgggcttgttatttgtacattaaagattttttccaagtaagttacactctgttaacttcctgctagccatcagcatgagccctactgcctaaacactatttcatttatttatgtttggaaaccccgtaaacatttttgtttgcaatcttgtttcttttgttataagtcaagtttgaatgttacaatacttttattgaaacttttgttaagttttttcttgtaaattttctttacttgtgagtatcatcttgtcctttaatcctgtaccctaaaataagaaatacatttttgacagaggcttaatgttttaacaaaagagtgtggacatttttattttaaaatttaggcaaaagtcactatcaaatggttgcttatttgtctcayacagccatatagtttttcctggagggttttgttttgttgttgttgaaaagactttgcttacagctagatgaaactttctatagaaaaaaaaaytgttgaaaggtccagttctcagtaccatgtgagttaatgatacwacaamtaagttctttttaaaaagtgattaatgtattttataaattggctgngcactttaaacaaaagtcngaatntatacaggctc

SEQ ID NO: 343 - DNA, 1561 bp, Homo sapiens
  misc feature (1311): n equals a,t,g, or c
  misc feature (1538): n equals a,t,g, or c
gcaccgggcgccgccacagtagctgtaactgccaccgcgatgccgaagcgcccaagcagcagccgccggagcccgagtggatcggggacggagagagcacgagcccatcagacaaagtggtgaagaaagggaagaaggacaagaagatcaaaaaaacgttctttgaagagctggcagtagaagataaacaggctggggaagaagagaaagtgctcaaggagaaggagcagcagcagcagcaacagcaacagcagcagcaaaaaaaaagcgagatacccgaaaaggcaggcggaagaaggatgtggatgatgatggagaagagaaagagctcatggagcgtcttaagaagctctcagtgccaaccagtgatgaggaggatgaagtacccgccccaaaaccccgcggagggaagaaaaccaagggtggtaatgtttttgcagccctgattcaggatcagagtgaggaagaggaggaggaagaaaaacatcctcctaagcctgccaagccggagaagaatcggatcaataaggccgtatctgaggaacagcagcctgcactcaagggcaaaaagggaaaggaagagaagtcaaaagggaaggctaagcctcaaaataaattcgctgctctggacaatgaagaggargataaagaagaagaaattataaaggaaaaggagcctcccaaacaagggaaggagaaggccaagaaggcagagcarggttcagaggaagaagagagaagaagaggaggaggaaggaggagagtctaaggcagatgatccctatgctcatcttagcaaaaaggagaagaaaaagctgaaaaaacagatggagtatgagcgccaagtggcttcattaaaagcagccaatgcagctgaaaatgacttctccgtgtcccaggcggagatgtcctcccgccaagccatgttagaaaatgcatctgacatcaagctggagaagttcagcatctccgctcatggcaaggagctgttcgtcaatgcagacctgtacattgtagccggccgccgctacgggctggtaggacccaatggcaagggcaagaccacactcctcaagcacattgccaaccgagccctgagcatccctcccaacattgatgtgttgctgtgtgagcaggaggtggtagcagatgagacaccagcagtccaggctgttcttcgagctgacaccaagcgattgaagctgctggaagaggagcggcggcttcagggacagctggaacaaggggatgacacagctgctgagaggctagagaaggtgtatgaggaattgcgggccactggggcggcanctgcagaggccaaagcacggcggatcctggctggcctgggctttgaccctgaaatgcagaatcgacccacacagaagttctcagggggctggcgcatgcgtgtctccctggccagggcactgttcatggagcccacactgctgatgctggatgagcccaccaaccacctggacctcaacgctgtcatctggcttaataagtgcgttacggcctttgcatcattggtncccattctgcactttcttcccct

SEQ ID NO: 344 - DNA, 2982 bp, Homo sapiens
  misc feature (20): n equals a,t,g, or c
  misc feature (795): n equals a,t,g, or c
  misc feature (1329): n equals a,t,g, or c
  misc feature (1995): n equals a,t,g, or c
gctcacagcgactgcgcggnacgggttcctgagtggaacatggcgacttgcgccgaaatcctgcggagcgagttccccgaaattgacggacaagtcttcgactacgtgaccggcgtcttgcacagcggcagcgcggacttcgagtctgtggatgacctggtggaagctgtaggggaactattgcaagaggtgtccggggacagcaaggatgacgcgggcatcagggccgtgtgccagcgcatgtacaacactctgcgtctggctgagccacaaagccagggaaatagccaggtgctactggacgcccctatccagttgtcaaagataacggagaactacgactgtggaaccaaacttccaggactgctaaagagggaacagtcctcgacagtgaatgcaaagaagttagagaaggccgaggctcgacttaaggcaaagcaggagaagcgctcagagaaggacacgctcaagaccagcaaccctctagtcttagaagaggcatcagccagccaggcaggcagcagaaaggagagtcggttggaatcatctggcaagaacaaatcctatgatgtgcgaattgagaactttgatgtgtcttttggcgatagagtactgctggctggagcggatgtgaacctggcatggggccgccgttacgggctggtggggcggaatgggttggggaagacaacgttactgaagatgctggccacccggagtctgcgggttccagcccacatttccctgctgcacgttgagcaagaggttgctggagatgacactcctgccctgcanagtgtgctggagagtgacagtgtgcgagaggatttgctacggagggagcgggagctcactgcccagattgctgctggcagggcggagggctctgaagctgcagagctggcagaaatctatgccaaactggaggagattgaggctgacaaggcacctgccagggcatcagtcattctcgctgggcttggctttacccctaaaatgcagcagcagcccacccgggagttctcaggtggctggaggatgaggctggccctggcccgggmcctctttgctaggccagatcttctgctgttagatgaacctacaaacatgctggatgtcagggccatcctgtggctggagaattacctgcagacgtggccctccaccatcctagtcgtctcccacgaccgcaacttcttgaatgccatcgccacagacatcatccacctgcacagccagcggctagatggttaccggggagactttgagaccttcatcaagagtaagcaggagcggctgctcaaccagcagcgtgaatatgaggcgcanagcagtatcgccagcacatccaggttttcattgaccggtttcgctacaatgccaacagggcctctcaagtgcagagtaaactcaagatgctggagaagctgcctgagctgaagcctgtggacaaggaatcagaggtcgtaatgaagttccctgatgggtttgagaagttctcgccgccaattctgcagctagatgaggtggatttctactacgatccgaagcacgtcatcttcagtcgcctctctgtgtctgctgatctcgagtctcgcatctgtgtggttggagagaatggggctgggaagtctaccatgctgaagctgcttttgggggacctggcacctgttcggggcatcagacacgctcacaggaatctgaagattggctatttcagccagcaccatgtggagcagctggacctaaacgtcagtgctgtggaactgctggcacgcaagtttcctgggcggcctgaggaggagtaccgtcaccagctgggtcggtatggcatctccggagaactggccatgcgtcctcttgccagcctgtctgggggccagaagagccgagtggcctttgctcagatgactatgccctgccccaacttctacattctggatgaacccacaaaccacctggacatggagaccattgaggctctgggccgtgccntcaacaatttcaggggtggtgtgattctggtgtcccacgatgagcgctttatcaggctggtgtgccgggagttgtgggtatgcgaaggaggcggcgtcacccgtgtggaaggaggatttgaccagtaccgcgccctcctccaggaacagttccgccgcgaaggcttcctctagggccaccaggctgaggactcgcccaggacatggactggtctctcagacccctgggccaccatgtaggccaccactccaggccgtggacttcccccaacttggggacagccttattcccaaatgtctctatccttttgactggagcatcttctgcacaaccttgggagcccatccaagggttggtgaggactggtctcccgggggtgggggtctggggggtacctctggggttatagattcccccactgccccagctctgactggaccccaagtggctgctatgtaaattaaatctctccccgcgtctcctttgcctcatgtctgctgctccctgggcagtggttgcctcctactgagggctgtggactctcggattggcgttttcctatggcacttgtatccctcacgtgtaggaagcaatagcagcaccagccttgcctctagaagagacattgtcaagctactggggcatggaggtcatctgcctgcctgaccttggggtgggctgagccagtggaatgaagggcagtgtattggcatcattgcggtgctgttagccctagcctgggctcagcctcagctgaaggggtcttgggttctgtcgtcacagcccccactgatgggcagttgaactgattgtgtaacctggcctcacacgtggccagctgctttctccagtcatatctggctccggcttgccctgcttytctgctctctagactcagcactgaagagaaaccatctttgtcctcaaaaaaaaaaaaaaaaaaaaaaaaaaaaaaaaaaaaaaaaaaaaaaaaaaaaaaaaactcga

SEQ ID NO: 345 - DNA, 1654 bp, Homo sapiens
  misc feature (5): n equals a,t,g, or c
  misc feature (14): n equals a,t,g, or c
  misc feature (26): n equals a,t,g, or c
  misc feature (41): n equals a,t,g, or c
  misc feature (1538): n equals a,t,g, or c
  misc feature (1546): n equals a,t,g, or c
  misc feature (1584): n equals a,t,g, or c
  misc feature (1630): n equals a,t,g, or c
aaaanctgtgtgtnattgtaaaagcncctagctgtttgacnacctgtaatgaaaatgctgcaccttccaactggtatttccattagagaaccgtgtgtgtgccgtgtgtgtggtgcctttgagcaactttattttatggttaccatatttttaaaaagattttttgtcagggtgacttaacatggactcttatagggtattaaaacaatctagattattccttttcatcctaaataagcctaccaaatttcatgctgttggtttgccatgaatgatattacttcctacattatatttgtgttttttcaaatctgctatggaatgaacttattcctagatttggatatgtaagagaaacctgcagtcatcttttgatttataaggcaattcttgtggataaatagtgatttctcagcctctgacccattttataactgaaatttagccctttagagcttgttatatctggttttcctacgtttttctatgtaatattattccattccagtagcattattgatagaaatagtaagtatttatggaatagtaaaatatggacaaattacgtgtgtgacatatctgtcaawataagttagaagcttattcttggtttgtgtaatgaatttatgtattgtagtgaatacctttactggtgtgaagataattatgcacaaaccctcacaatacgcgttaacattgaaacctgtgaaatgtccttaggttgggtcatataaagccaaccatttttgaggaccatgtacctagtgctttgaaaactgtaagtcactatatgaatatgacaatatgtgcacatttaaaattcagagctcggcattgtgatactgatgcagaagctagtagattggttaaaagtctggacttctgtggcatttttttcgtgacgtgataatctatcataagcagacctaagcacagttttatgaacacaattttgcccatgacattgcctacaggatttccagatgtgacttgcactcagaagawcagtggtcaacttcmgaagctcttccacgcttagawcatgtcttcagaacttagatgtgaaaatctacacactgggagatgctgtgagccccaaggttttgatggagtttgccttggaatccctcttgacttcatgccacattgacgtgaactttgatgtataataagcagcagcaacttcatgtgaaaatatggtcaggtagttatatgtaaggttacgtggtccagtaatgtcttagattgataaattaggtatggaatccatcagtgttacgtgatgagaataggtgaacacaccttgtcagtgatgatgtaaacttctctccttggcaggacatgggcaaacatgctgattggtgcaaatgtggtgccgagctgtccatagctgcagtgaaagatgaagagcaagaccttctctaggttttctagctttcattaaatgtatttttttccccagagctaatttgaaagttgattggaccactgtggatggggtstcattaagaatgtgggaaataggggccggagtgcgntggctcanacctgtaatccccagcaagtttgggaaagggccagggncagggttggaatcggcttgatccccaggaaggtccgaagacccagncctggggggaacacatcctggtct

SEQ ID NO: 346 - DNA, 498 bp, Homo sapiens
  misc feature (252): n equals a,t,g, or c
  misc feature (493): n equals a,t,g, or c
ggtacaggctgcatcagaagaggccatcaagcagatcactgtccttctgccatggccctgtggatgcgcctcctgcccctgctggcgctgctggccctctggggacctgacccagccgcagcctttgtgaaccaacacctgtgcggctcacacctggtggaagctctctacctagtgtgcggggaacgaggcttcttctacacacccaagacccgccgggaggcagargacctgcaggtggggcargtgganctgggcgggggccctggtgcargcagcctgcagcccttggccctggaaggggtccctgcaraagcgtggcattgtggaacaatgctgtaccagcatctgctccctctaccagctggaraactactgcaactagacgcagccygcaggcagccccacacccgccgcctcctgcaccgaragaratggaataaagcccttgaaccagcaaaaaaaaaaaaaagggggggccgttttagagganccaag

SEQ ID NO: 347 - DNA, 3176 bp, Homo sapiens
  misc feature (2546): n equals a,t,g, or c
agcggctcaggacccacgctgcccccacccctcccgagcaggcgcccccatggcccgaccccgctgattccttcactcggccatgctcccgcggcccctgcggctgcttttggacacgagcccccccgggggagtcgtactgagcagcttccgaagccgggaccccgaagagggtgggggcccaggtggcctggtcgtgggcggggggcaggaggaagaggaggaggaagaagawsaggcccctgtgtccgtctgggatgaggaggaggatggtgccgtgtttaccgtcacaagccgccaatatcgacctcttgatcccttggtccctatgcctcccccacgttcctcccgacggctccgagctggcactctggaggccctggtcagacacctactggatacccggacatcagggactgatgtgagcttcatgtcagccttcctggctacccaccgggccttcacctccacgcctgccttgctagggcttatggctgacaggctggaagcccttgaatctcatcctaccgacgaactagagaggacaacagargtagccatctctgtactgkcaacctggctggcctctcaccctgaggattttggctctgaggccaagggtcagcttgaccggcttgagagcttcttacttcagacagggtatgcagcagggaagggtgttggggggggcagcgctgacctcatccgcaatctccggtcccgggtggacccccaggcccccgaccttcctaagcccctggccctccccggcgatccccctgctgaccccacggatgtcctggtgttcctcgctgaccacttggccgaacagctgaccctgctagatgcggtgagaccctgacctctggcccctatgccccctgaccccttactaacctctccttgactccagatcctttccttgcttccaccccttcctgatccagctcctagcctcctccacctaccattttgattctccccttttccctttggtcgttacccttcaaaccctgtgcccctctggttccttggccacctgagatcctcagatccctgatattggaaggctgacctcacttgactatgaactttaacctctgacctctaccctgcaggaactttttctcaatttgatcccctctcagtgcctgggaggcctgtggggtcacagagaccggccaggacattctcacctctgcccatctgtccgagctactgtcacacagtttaacaaggtggcaggggcagtggttagttctgtcctgggggctacttccactggagagggacctggggaggtgaccatacggccactccgtcccccacagagggcccggctcctggagaagtggatccgcgtggcagaggagtgccggctgctccgaaacttctcttcagtttatgccgtggtgtcagccctgcagtccagccccatccacaggcttcgggcagcctggggggaagcaaccagggacagcctcagagtcttttccagcctctgccagattttctccgaggaggataattattcccagagtcgggagctgctcgtgcaggaggtgaagctgcagtctcctctggagccacactccaagaaggccccgaggtctggctcccggggtgggggtgtggtcccataccttggcaccttcctgaaggaccttgtgatgctggatgcagcctccaaggatgagttggagaatggatacatcaattttgacaagcggaggaaggagtttgcagtcctttctgagttgcgacggctccagaatgaatgtcgtggctataacctccaacctgaccatgatatccagaggtggctacaggggctccggccactgacagaggctcagagccatcgtgtatcctgtgaggtggagccacctggttccagtgaccctcctgccccacgggtgcttcggccaacattggtcatctcgcagtggacagaggttttgggctctgttggggtccctaccccgcttgtgtcctgtgaccggcccagtactgggggagatgaggcgcctacaactcctgctcctctgctgactcggctggcccagcacatgaagtggccatctgtctcgtcactagactctgccttggaaagcagtccatccctgcacagtccagctgaccccagccacctctccccaccagcctcctcccctaggccttctcgaggtcaccgccgctcagcctcctgtggctccccgctgagtgggggtgcagaagaggcctccggggggactggatatgggggagagggatctgggccaggggcctctgattgccgtatcatccgagtccagatggagttgggggaagatggcagtgtctataagagcattttggtgacaagccaggacaaggctccaagtgtcatcagtcgtgtccttaagaaaaacaatcgtgactctgcagtggcttcagagtatgagctggtacagctgctaccaggggagcgagagctgactatcccagcctcggctaatgtattctacgccatggatggagcttcacacgatttcctcctgcggcancggcgaaggtcctctactgctacacctggcgtcaccagtggcccgtctgcctcaggaactcctccgagtgagggaggagggggctcctttcccaggatcaaggccacagggaggaagattgcacgggcactgttctgaggaggaagccccgttggcttacagaagtcatggtgttcataccagatgtgggtagccatcctgaatggtggcaattatatcacattgagacagaaattcagaaagggagccagccaccctggggcagtgaagtgccactggtttaccagacagctgagaaatccagccctgtgggaactggtgtcttataaccaagttggatacctgtgtatagcttcccaccttccatgagtgcagcacacaggtagtgctggaaaaacgcatcagtttctgattcttggccatatcctaacatgcaagggccaagcaaaggcttcaaggctctgagccccagggcagaggggaatggcaaaatgtaggtcctcgcaggagctcttcttcccactctgggggtttctatcactgtgacaacactaagataataaaccaaaacactacctgaattctaaaaaaaaaaaaaaaaaaaaaaaaaaaaaaaaaaaaaaaaaaaaa

SEQ ID NO: 348 - DNA, 1127 bp, Homo sapiens
  misc feature (1017): n equals a,t,g, or c
  misc feature (1047): n equals a,t,g, or c
  misc feature (1057): n equals a,t,g, or c
gccgcctctgcgtgtggggccgcccgcgccagtgtgagcctgagctgacggcggctccgggaggctcgcagaaggggagggccgggcggcgcgggagctgagcatcgccagggcgggcggcagggcgcggcctctccgccgggtgtaccacctgtcgcggcgcgagacctctggtgaaagaaaagatgttgtcccggttaagagtagtttccaccacttgtactttggcatgtcgacatttgcacataaaagaaaaaggcaagccacttatgctgaacccaagaacaaacaagggaatggcatttactttacaagaacgacaaatgcttggtcttcaaggacttctacctcccaaaatagagacacaagatattcaagccttacgatttcatagaaacttgaagaaaatgactagccctttggaaaaatatatctacataatgggaatacaagaaagaaatgagaaattgttttatagaatactgcaagatgacattgagagtttaatgccaattgtatatacaccgacggttggtcttgcctgctcccagtatggacacatctttagaagacctaagggattatttatttcgatctcagacagaggtcatgttagatcaattgtggataactggccagaaaatcatgttaaggctgttgtagtgactgatggagagagaattctgggtcttggagatctgggtgtctatggaatgggaattccagtaggaaaactttgtttgtatacagcttgtgcaggaatacggcctgatagatgcctgccagtgtgtattgatgtgggaactgataatatcgcactcttaaaagacccattttacatgggcttgtaccagaaacgagatcgcacacaacagtatgatgacctgattgatgagtttatgaaagctattactgacagatatggccggaacacactcattcagttcgaagactttggaaatcataatggcattcaggttcttgaggaaagtaccgaggaaaaatattgttactttncaatgatggatatttcaaggggacagctgncagttagctnctagccaggtcttcttggcaggcacaaaaagttatttagttaaaccattctccgaacacaaatcttattt

SEQ ID NO: 349 - DNA, 2135 bp, Homo sapiens
aattcggcacgaggaagacaccgtgcaggtgagcacattgctgcgcccgccccactgcccccgcatggtccaggacggcgactttgtccgctaccactacaatggcaccctgctggacggcacctccttcgacaccagctacagtaagggcggcacttatgacacctacgtcggctctggttggctgatcaagggcatggaccaggggctgctgggcatgtgtcctggagagagaaggaagattatcatccctccattcctggcctatggcgagaaaggctatgggacagtgatccccccacaggcctcgctggtctttcacgtcctcctgattgacgtgcacaacccgaaggacgctgtccagctagagacgctggagctcccccccggctgtgtccgcagagccggggccggggacttcatgcgctaccactacaatggctccttgatggacggcaccctcttcgattccagctactcccgcaaccacacctacaatacctatatcgggcagggttacatcatccccgggatggaccaggggctgcagggtgcctgcatgggggaacgccggagaattaccatccccccgcacctcgcctatggggagaatggaactggagacaagatccctggctctgccgtgctaatcttcaacgtccatgtcattgacttccacaaccctgcggatgtggtggaaatcaggacactgtcccggccatctgagacctgcaatgagaccaccaagcttggggactttgttcgataccattacaactgttctttgctggacggcacccagctgttcacctcgcatgactacggggccccccaggaggcgactctcggggccaacaaggtgatcgaaggcctggacacgggcctgcagggcatgtgtgtgggagagaggcggcagctcatcgtgcccccgcacctggcccacggggagagtggagcccggggagtcccaggcagtgctgtgctgctgtttgaggtggagctggtgtcccgggaggatgggctgcccacaggctacctgtttgtgtggcacaaggaccctcctgccaacctgtttgaagacatggacctcaacaaggatggcgaggtccctccggaggagttctccaccttcatcaaggctcaagtgagtgagggcaaaggacgcctcatgcctgggcaggaccctgagaaaaccataggagacatgttccagaaccaggaccgcaaccaggacggcaagatcacagtcgacgagctcaagctgaagtcagatgaggacgaggagcgggtccacgaggagctctgaggggcagggagcctggccaggcctgagacacagaggcccactgcgagggggacagtggcggtgggactgacctgctgacagtcaccctccctctgctgggatgaggtccaggagccaactaaaacaatggcagaggagacatctctggtgttcccaccaccctagatgaaaatccacagcacagacctctaccgtgtttctcttccatccctaaaccacttccttaaaatgtttggatttgcaaagccaatttggggcctgtggagcctggggttggatagggccatggctggtcccccaccatacctcccctccacatcactgacacagctgagcttgttatccatctccccaaactttctctttctttgtacttcttgtcatccccactcccagcccctattcctctatgtgacagctggctaggacccctctgccttcctccccaatcctgactggctcctagggaaggggaaggctcctggagggcagccctacctctcccatgccctttgccctcctccctcgcctccagtggaggctgagctgaccctgggctgctggaggccagactgggctgtagttagcttttcatccctaaagaaggctttccctaaggaaccatagaagagaggaagaaaacaaagggcatgtgtgagggaagctgcttgggtgggtgttagggctatgaaatcttggatttggggctgaggggtgggagggagggcagagctctgcacactcaaaggctaaactggtgtcagtccttttttcctttgttccaaataaaagattaaaccaaaaaaaaaaaaaaaaaamtcgggggggg

SEQ ID NO: 350 - DNA, 1578 bp, Homo sapiens
  misc feature (1577): n equals a,t,g, or c
ggcacgagcggcacgagcggcacgagcggcacgaggagagtgagactctgtctcaaaagaraaaaaaaaagaaaagtaaccttcagagattcttagaagagttgctcattcacacccacgcccttgcccaaggctggcccacttagagcgaaacttaacttttgtctggatgggaagagaagtaagtctaccccgaggttgccatgttgaagagtgagaggtccaagtgattctgtgcattgaaaccaagacaccccacccagaacacttcttccctccctcagcccaaaccaaaggctggggttctcatctccaagtggctgttctccaactttcccaagccgcttgcattccccagactggactactgtggcggttaggttagatttgaagacggggcccaggctgggtatgaacgggtgcagccctcttctcctcttcccccccacatctctcatgagagaggtagtggcatttccttctcagggagcttcaatgggaaaggtctcgaaagcttcaggaggagcagaataccaacgcaggggatggctgtaacgatctcaccgtctcctaacctcagtcccttttttgagagtgaaatggtggagggtgggaagggacccagatttgtagatctctttgtctgggggaggggaaggatgtggtttgcagagcggaacagagtttggaaacgcatgasagcagagcttcgtgtgttcccaccctcagtggaggaggtgtgagtgggtgagcatgtggagttgggtgttcccaccctcagtgaggaggtgtgagtgggggtgcatatagaggcagtgcctgctgtggggtcacaactggtgcatgccagcgccaaagggacctgtctttaggggtcatttcagccagctcctcccatcacagatgacagctccaagcctagaaggggctcagtgacagggccaggacaagccctcaggactgtggcctcctggcccttggttcccctgccccacaacatggtctccacatggctggctggctggctgtccctgtgtgtgtgtgacacacggtgtgagtgcagggctgtgcccggggtgggagggtgtctatgtggcactgactgtcttagctcagagctggtggatcctctccatggacaatgacactttaaggattgtcttggtttgtttttcctatttgtggggtattttccccctcaggctcctgggtctgctgctgcctcaaggtgtcctgaccttgaggctgatgaggggacccctgcctgtttcccccatactgagttctagggaggtgctcaccccagactcttaggaagggtctagagaaatgagaggagcccaagccaggggccagctccgagaaagggtaactccacgcttctctctcccaaattggaaatgaagacaggttttcaaaggcacargctccccctgccagcttctaggatcttccttggtgtgcaatgggccattargggtargcagcttgcacccattctccttatctcaattattttcctggggagaggtgctagarggattgaagtaacttcaactgggaattccaaggaagtng

SEQ ID NO: 351 - DNA, 974 bp, Homo sapiens
  misc feature (935): n equals a,t,g, or c
  misc feature (971): n equals a,t,g, or c
gagcaggcagagagatgaggaaactgagacccagaaaggtggaagcacttgtytaaggtcacgcctccaggaagcagtgtgtccacgactccagtccaagtggtcaggctccagagcccacagtcccaggggtccatgatgccgagctgcaatcgttcctgcagctgcagccgcggccccagcgtggaggatggcaagtggtatggggtccgctcctacctgcacctcttctatgaggactgtgcaggcactgctstcagcgacgaccctgagggacctccggtcctgtgcccccgccggccctggccctcactgtgttggaagatcagcctgtcctcggggaccctgcttctgctgctgggtgtggcggctctgaccactggctatgcagtgccccccaagctggagggcatcggtgagggtgagttcctggtgttggatcagcgggcagccgactacaaccaggccctgggcacctgtcgcctggcaggcacagcgctctgtgtggcagctggagttctgctcgccatctgcctcttctgggccatgataggctggctgagccaggacaccaaggcagagcccttggaccccgaagccgacagccacktggaggtcttcggggatgagccagagcagcagttgtcacccattttccgcaatgccagtggccagtcatggttctcgccacccgcmagcccctttgggcaatcttctgtgcagactatccagcccaagagggactcctgagctgcccacatggcctaagatgtgggtcctggatccttcccccttctcaccataaccccctctcagtgtttccccaacttctcccttttagcagggtccctttagagcccaactccaggtcaaatctggagctcaaatcccagtgctccctaacccttaccttcagtctccaccagcctgaaggncttcctaggggatcctcaggcggcccccaccagggnaca

SEQ ID NO: 352 - DNA, 2601 bp, Homo sapiens
  misc feature (2520): n equals a,t,g, or c
  misc feature (2572): n equals a,t,g, or c
ctcctttggactagcccggccgccaccgcggtgaacagaccgcaagcaccgcaaggccttcctggaggcccgccagtcgctggaggtgaagatgaacctggaagagcagagccagcagcaggagaacctcatgctttccatcctgcccaagcacgtggctgacgagatgctgaaagacatgaagaaagacgagagccagaaggaccagcagcagttcaacaccatgtacatgtaccgtcacgagaacgtcagcatcctctttgccgacatcgtgggctttacccagctgtcttctgcctgcagtgcccaggagcttgtgaagctgctcaacgagctctttgcccgctttgacaagctggcagctaaataccaccagctgcggattaagatcctgggcgactgctactactgcatctgcggcttgcccgactaccgggaggaccacgccgtctgctccatcctcatggggctggccatggtggaggccatctcgtatgtgcgggagaagaccaagactggggtggacatgcgtgtgggggtgcacacgggcaccgtgctggggggcgtcctgggccagaagcgctggcagtacgacgtgtggtcgactgatgtcactgtagccaacaagatggaggccggcggcatccctgggcgcgtgcacatctcccagagcaccatggactgcctgaaaggggagtttgatgtggagccaggcgatgggggcagccgctgtgattacctagaagagaagggtattgaaacctacctcatcattgcctccaagccagaggtgaagaaaacagccacccagaatggcctcaatggctcggccctgcccaatggagcaccagcttcctcaaagtccagctcccctgccctcattgagaccaaggagcccaacgggagtgcccacagcagtgggtccacgtcggagaagcccgaggagcaggatgcccaggccgacaacccctcattccccaacccacgccggaggctgcgcctgcaggacctggctgaccgagtggtggatgcctctgaagatgagcacgagctcaaccagctgctcaacgaggccctgcttgagcgagagtccgcccaagtagtaaagaagagaaacaccttcctcttgtccatgcggttcatggaccccgagatggaaacccgctactcggtggagaaggagaagcagagtggggctgccttcagctgctcctgcgtcgtcctgctctgcacggccctggtcgagatactcatcgacccctggctaatgacaaactatgtgaccttcatggtgggggagattctgctcctcatcctgaccatctgctccctggctgccatctttccccgggcctttcctaagaagcttgtggccttctcaacttggattgaccggacccgctgggccaggaacacctgggccatgctcgccatcttcatcctggtgatggcaaatgtcgtggacatgstcagctgtctccagtactacacgggacccagcaatgcaacggcagggatggaaacggagggcagctgcctggagaaccccaagtattacaactatgtggccgtgctgtccctcatcgccaccatcatgctggtgcaggtcagccacatggtgaagctcacgctcatgctgctcgtcgcaggcgccgtggccaccatcaacctctatgcctggcgtcccgtctttgatgaatacgaccacaagcgttttcgggagcacgacttacctatggtggccttagagcagatgcaaggattcaaccctgggctcaatggcactgacaggctgcccctggtgccttccaagtactctatgacggtgatggtgttcctcatgatgctcagcttctactacttctcccgccacgtagaaaaactggcacggacacttttcttgtggaagattgaggtccacgaccagaaggaacgtgtctatgagatgcgacgctggaacgaggccttggtcaccaacatgttgcctgagcacgtggcacgccatttcctggggtccaagaagagagatgaggagctgtatagccagacgtatgatgagattggagtcatgtttgcctccctgcccaactttgctgacttctacacagaggagagcatcaacaatggtggtattgagtgtctgcgtttcctcaatgaaatcatctcrgattttgactctctcctggacaatcccaagttccgggtgatcaccaagatcaaaaccattggcagcacgtatatggcggcttcaggagtcacccccgatgtcaacaccaatggctttgccagctccaacaaggaagacaagtccgagagagagcgctggcagcacctggctgacctggccgacttcgcgctggccatgaaggatacgctcaccaacatcaacaaccagtccttcaataacttcatgctgcgcataggcatgaacaaaggcggggttctggctggggtcatcggagcccggaaaccacactacgacatctggggcaatacagtcaatgtagccagcaggatggnagtccacgggggtcatgggcaacattcaggtggagaaggaaacccaagttcntcctccgaggagttacgggtttccgtttt

SEQ ID NO: 353 - DNA, 921 bp, Homo sapiens
gcgacagaagggggccttcctccggcwcagccgccgcgccgccgggctgctccttcttcctcctcgggcgcccgcggcgatgttcaaccgcgccgtgagccggctgagcaggaagcggccgccgtcagacatccacgacagcgatggcagttccagcagcagccaccagagcctcaagagcacagccaaatgggcggcatccctggagaatctgctggaagacccagaaggcgtgaaaagatttagggaatttttaaaaaaggaattcagtgaagaaaatgttttgttttggctagcatgtgaagattttaagaaaatgcaagataagacgcagatgcaggaaaaggcaaaggagatctacatgacctttctgtccagcaaggcctcatcacaggtcaacgtggaggggcagtctcggctcaacgagaagatcctggaagaaccgcaccctctgatgttccagaaactccaggaccagatctttaatctcatgaagtacgacagctacagccgcttcttaaagtctgacttgtttttaaaacacaagcgaaccgaggaagaggaagaagatttgcctgatgctcaaactgcagctaaaagagcttccagaatttataacacatgagcccccaaaaagccgggactggcagctttaagaagcaaaggaatttcctctcaggaccgtgccgggtttatcattgctttgttatttgtaaggactgaaatgtacaaaacccttcaatgggatgtgtgttttattaactgcttcaccagtaaattttgcatgatggctaagctaacataaaaaaagaataataataacttggaagttttagtttaaaaaaaaaaaaaaaaaaaaaaaaaaaaaaaaaaaaaaaaaaaaaacggacgcgtgggcggacgcgtgggcggacgcgtggg

SEQ ID NO: 354 - DNA, 1311 bp, Homo sapiens
gcgcggtcgcgtgcgggagggggcgggtggggaaggatcgcaggcgagattacgaggcgaggctcgcgcgcccgcccccgccctggcccccagtgcccacccggtcggcccggcacagccatgatcaaggcgatcctaatcttcaacaaccacgggaagccgcggctctccaagttctaccagccctacagtgaagatacacaacagcaaatcatcagggagactttccatttggtatctaagagagatgaaaatgtttgtaatttcctagaaggaggattattaattggaggatctgacaacaaactgatttatagacattatgcaacgttatattttgtcttctgtgtggattcttcagaaagtgaacttggcattttagatctaattcaagtatttgtggaaacattagacaaatgttttgaaaatgtctgtgagctggatttgattttccatgtagacaaggttcacaatattcttgcagaaatggtgatggggggaatggtattggagacaaatatgaatgagattgttacacaaattgatgcacaaaataagctggaaaaatctgaggctggcttagcaggagctccagcccgtgctgtatcagctgtaaagaatatgaatcttcctgagatcccaagaaatattaacattggtgacatcagtataaaagtgccaaacctgccctcttttaaataaaaatgtaaaaaggccactcccaggtaaaatccagggggaagagtcatctaagtttaccatgcagttgtttaccaaaaatagaggaggagagtcttaacttttgctcttggatttaagtcaaggtactgtatagaagttgtgtaaaatcagtatgaaagttcaatgttgctgttcttgctcagtgattttaaagaaattgagtagttcctatgtgatttttttttttcttttctaaactgcattcctgtgcccacctacggcatgcctctatgtattggctactacagtgttttaaaaagtgtttcagatatttctctaattatgtacaacctaaaatgttggtgttttgtatggatcacaagtgcagcattccttaattccttctgctatatgtcacacagttgttatttggagaaccaagtatgtattgcatgaaaacattatgacttttttctcttagtttaaataaactccaaggtaactggacttctaaagcacctttctgtttgcctgatatctactttagcaataattttttttacaaccctctgactcaacaaagtaaataaaagtatattttatcactattaaaaaaaaaaaaaaaaaaaa

SEQ ID NO: 355 - DNA, 2253 bp, Homo sapiens
  misc feature (430): n equals a,t,g, or c
ggcgaactctggcccggcgtgtagcgggcgcactacggggacgctgggccgggcaccgggctgtgtggagaagtgagcgcgctcgtctgacccccgtgcccgccaccccgagccactaacggcgatctcccaaggcctgcccgaggcctctgtcctctgtcctcagccccgcagcggcaacgtcttgcactcggcgagctcgccgctcccgaccctcccgcgcccccgccctgccgcgctgctccccgcccagccgcgggtctgtggtccaagccgccccgaagcagcccgaacaagatcactcaaggtgaaggataatctactaataccagcactttgaatgaaaatttgtttctctgccacaaactgaacatctttttttttttttttttttttggtgggggagttgaaacctaattttgtggcgtanagctatgcagcttgaaatccaagtagcactaaattttattatttcgtatttgtacaataagcttcccaggagacgtgtcaacatttttggtgaagaacttgaaagacttcttaagaagaaatatgaagggcactggtatcctgaaaagccatacaaaggatcggggtttagatgtatacacataggggagaaagtggacccagtgattgaacaagcatccaaagagagtggtttggacattgatgatgttcgtggcaatctgccacaggatcttagtgtttggatcgacccatttgaggtttcttaccaaattggtgaaaagggaccagtgaaggtgctttacgtggatgataataatgaaaatggatgtgagttggataaggagatcaaaaacagctttaacccagaggcccaggtttttatgcccataagtgacccagcctcatcagtgtccagctctccatcgcctccttttggtcactctgctgctgtaagccctaccttcatgccccggtccactcagcctttaacctttaccactgccacttttgctgccaccaagttcggctctaccaaaatgaagaatagtggccgtagcaacaaggttgcacgtacttctcccatcaacctcggcttgaatgtgaatgacctcttgaagcagaaagccatctcttcctcaatgcactctctgtatgggcttggcttgggtagccagcagcagccacagcaacagcagcagccagcccagccgccaccgccaccaccaccaccacagcagcaacaacagcagaaaacctctgctctttctcctaatgccaaggaatttatttttcctaatatgcagggtcaaggtagtagtaccaatggaatgttcccaggtgacagcccccttaacctcagtcctctccagtacagtaatgcctttgatgtgtttgcagcctatggaggcctcaatgagaartcttttgtagatggcttgaattttagcttaaataacatgcagtattctaaccagcaattccagcctgttatggctaactaaaaaaaagaaaatgtatcgtacaagttaaaatgcacgggcccaagggggattttttttttcacctccttgagaatttttttttttaagcttatagtaaggatacattcaagcttggttaaaaaaataataataaaacatgcatcatttttcatttgccaaccaagcacaaagttattttatactgactgtatattttaaagtatactctcagatatggcctcttacagtatttaagatatagcaaggacatggctgatttttttttataaaaattggcactaataagtgggtttattggtcttttctaattgtataatttaatttagtacaaagtttgtaaaatatcagaggatatatatatattgtttctacgacatggtattgcatttatatctttttactacagtgatctgtgacagcagcagcttcatgttgtattttttttactgaaattgtaaaatatccatcttaaagacatcaactattctaaaaattgtgtacaggatattcctttagtggtggaattaaaatgtacgaatacttgctttttcaaaaaaatgtattttctgttaaaagtttaaagatttttgctatatattatggaagaaaaatgtaatcgtaaatattaattttgtacctatattgtgcaatacttgaaaaaaacggtataaaagtattttgagtcagtgtcttacatgttaagagggactgaaatagtttatattaagtttgtattaaaattctttaaaattaaaaaaaaaaaaaaaaaaaaaactcgtgc

SEQ ID NO: 356 - DNA, 1235 bp, Homo sapiens
  misc feature (1102): n equals a,t,g, or c
  misc feature (1109): n equals a,t,g, or c
  misc feature (1154): n equals a,t,g, or c
  misc feature (1169): n equals a,t,g, or c
  misc feature (1171): n equals a,t,g, or c
agcttataccagctgaatggcagccttgcctaatccacctacaacaagaatttcttaagctttcttttatttgcatgagagagccactaccaaggcatgttttgttatgctgaaactgggctgctgcatactgctaaatggcacctctgggattggcctacctggggatttcttgrtttgtgaaaacaggagaggagaaatatctsatacaagtgaaaggatactggagagagaaattacccatttctaaaaaaaaaccacactctgtcgtatctgtgttaatgttttctagcatgtactctggtttcaacagacacaaatttatatgttaacccagttttcttgccgttctgtaagtgttttattcttagtgtgatttttttccattgggatgtttttgattgaacttgttcattttgttttgcttgggaggaaaataaacaattttacttttttcctttaggagcattatgagcattatgtcagaatagaatagaattggggttcgatcttaacaggccagaaatgcctgggttttwttggtttgtttttgtttttgtttttttatcaaatcctgcctgactgtctgcttgttttgcctaccatcgtgacatctccatggctgtaccaccttgtcgggtagcttatcagactgatgttgactgtyraatctcatggcaacaccagtcgatgggctgtctgacattttggtatctttcatctgaccatccatatccaatgttctcatttaaacattacccagcatcattgtttataatcagaaactctggtccttctgtctggtggcacttagagtcttttgtgccataatgcagcagtatggagggaggattttatggagaaatggggatagtcttcatgaccacaaataaataaaggraaactaagctgcatgtgggttttgaaaaggtatwatactcttaacaatyctttttttcagggacttttctagctgtatgactgttacttgacctyctttgaaaagcattcccaaaatgcyctattttagatagwttaacattaaccaacataatttttttagatcgagtcagcataaattcctaagtcagcctctagtcgngggtcancccttcaccggcatttaattggggttgtcggaggaaggaaggggnagccaaacggatggncnattggaccaacctggggtcatgggcaaaattcagggggggatattaatggaaaaaattggtccc

SEQ ID NO: 357 - DNA, 1408 bp, Homo sapiens
  misc feature (1396): n equals a,t,g, or c
tttaatttacagtttcttctgggcctttcaacattatcaatgtctccctttctggcggcacgaatgaagaaattttggaatccataagagccaaaaagggagacattgataatgttaaaagccccacgggggaagaaacagaaaaagacaagaatgagactgagaatgactctaaagatgctgagaaaaacagagaagaatttgaagaccagtcccttgaaaaagacagtgacgacaaaacaccagatgatgaccctgagcaaggaaaatctgaggtaggtgatttcaaatcggagaagtccaacggggagctaagtgaatctcctggagctggaaaaggagcatctggctcaactcgaatcatcaccagattgcggaatccagatagcaaacttagtcagctgaagagccagcaggtggcagccgctgcacatgaagcaaataaattatttaaggagggcaaagaggtactggtagttaactctcaaggwgaaatttcacggttgagcaccraaaagraagtgrtcatgaaaggaartatcaacaattatyttaaattgggtcaagaagggaagtatcgcgtctaccacaatcaatactccaccaattcatttgctttgaataagcaccagcacagagaagaccatgataagagaaggcatcttgcacataagttctgtctgactccagcaggagagttcaaatggaacggttctgtccatgggtccaaagttcttaccatatctactctgagactgactatcacccaattagaaaacaacatcccttcatcctttcttcatcccaacygggcatcacatagggcaaaytggatcaaggcagttcagatgtgtagcaaacycagagaatttgcattggctttagccattttggagtgtgcagttaaaccagttgtgatgctaccaatatggcgagaatctttaggacataccagctttctccctttgtctcataaccatgtccaccaatgagaatgctaatacacaagctgcccatcttcacagatctaagaacaagggaaaggacagtacagaaacgaggcgtcacagaatagaggtcaatgtggagctgaggaaagctaagaaggatgaccagatgctgaagaggagaaatgtaagctcatttcctgatgatgctacttctccgctgcaggaaaactgcaacaaccagactcctgccctaagagccatagggaatatcgtcactggtacagatgaacagactcaggttgtgattgatgcaggagcactcgccgtctttcccagcctgcttcaccaaccccaaaactwaacattcagaaggaagctacgtggacatgtcaaacatcacagccagccgccaggaccagatacagcaagttgtgatcatggrttantcccttccttgt

SEQ ID NO: 358 - DNA, 872 bp, Homo sapiens
  misc feature (803): n equals a,t,g, or c
  misc feature (813): n equals a,t,g, or c
  misc feature (871): n equals a,t,g, or c
tggaactgatccttgaaccaaaggatctatacattgatcgtcctttaccatatctcattgggtcaaagctgttcatggaacaagaagatgtaggtcttggagagctgtccagtgaagaaggctctgtaggcagtgatcgtggcagtattgtggacactgaggaagagaaagaagaggaggagtcagatgaagattttgcccatcacagtgacaatgaacaaaaccagcacaccacacaaatgagtgatgaggaagaggatgatgatggctgtgacctttttgctgactctgagaaggaggaggaagatattgaggacattgaagaaaatactagacctaaaagaagcagacctacatcgtttgcagatgagctggctgcccgcatcaagggggatgccatgggtcgagtggacgaggagccgacaaccttaccctcaggagaagcaaaacctcggaagacactcaaagagaagaaggaaaggagaactccttcagacgatgaagaggataacttattcgcaccccccaagctgaccgacgaggacttctcgccatttggctctggaggtggcctgttcagtggcggcaagggrctatttgatgatgaggacgaggagagtgacctcttcayggaagccycccaggatcggcaagctggagcctctgttaaggaggagtcttcatcatccaaacctggaaagaaaatcccagcaggagctgtttctgtatttttaggagacacggatgtgtttggtgctgcctccgttccatcactgaaggagccacagaagcctgagcagccnactccaaggnaaagcccctatggtccccctcccactggcctctttgatgatgatgatggtgatgatgnt

SEQ ID NO: 359 - DNA, 1744 bp, Homo sapiens
  misc feature (1744): n equals a,t,g, or c
ccgcgcccggccgcagctgcctttcttctcagtaggcggggctgggtggagttcccaccttgtcccaggcactgtcgtggagactgctttgctctgtggcctcgtgttccccgctgcctctcggtcttgcttttatccacatccagcctcatccacacccgccaggkctcctccttgggatcttggggtgggccaaggcggtaccagttgcacagacggcccgggccttgtcagcggggagcccggtgctttggtggcttgtttttccctgtctttaataggaatcaagtgtgatatcatgaattgatggggggaagattaagaaggctttgtaagactataagttagtttgctgtgaagagtgtgcttattaaatgctttctgcaacacgmagactgcagcccttgactttgaaatcatctgtttttagaatcttgaaagaattgaaattagttttctggctgattcccttcccttccttcctagaaaagacaactggcagtgcagagtttagcatttaatttgaaagrtaaagtcttttgtgaattatttcctgaagtcgtggaggtaagaaagacggaagtgggtttcgccttcccctgcgttaaaacacttgagtttcacctctttccaaagagtaaaatctgtgtcctgaagctgcagacctccccaggggatggctcctctcccccaggagccccgaggcaggggaggcagaaagcctgggctctggggggtggcctgcggacagctgtgctggtgggccgggggctgggcctgtcccacaggggcgtggagctcgtggttctgagcagccagctgggtggtgtctggggatagctgggaggcacagcggctgccatgtgggactgggactggagtgctccctggtcttggcctctgtggctcagccttgctctggtctgcctgagtgcaggggccaaggggcacagggccagtgaggccggccacgctcgggccctcacctgtgagatggggtcggaatttgacacagcctagggcttggttcttggtggtggaccgtggactcctgagaacgggagtgctggtcctgaaaggcgtggttggagaccagctgcttttctcgctgtttttctcktaggagattaaacaaaaacagaaagcacaagacgaactcagtagcagaccccagactctccccttgccagacgtggttccagacggggagacgcacctcgtccagaacgggattcagctgctcaacgggcatgcgccgggggccgtcccaaacctcgcagggctccagcaggccaaccggcaccacggactcctgggtggcgccctggcgaacttgtttgtgatagttgggtttgcagcctttgcttacacggtcaagtacgtgctgaggagcatcgcgcaggagtgaggcccaggcgccgagacccaaggcgccactgagggcaccgcgcaccagagcgtgacctcggcaggctggacacactgcccagcacaggcagacccaccaggctcctaggtttagcttttaaaaacctgaaaggggaagcaaaaaccaaaatgtgtgactgggctttggaggagactggagcctcagccctgtcctgccacgggccgctggggctggtgtgggtgggccttgtgtgctggatttgtagcttatcttccgtgttgtctttggacctgttttagtaaacccgtttttcattttaaaaaaaaaaaaaaamaactttgggggggggccccn

SEQ ID NO: 360 - DNA, 673 bp, Homo sapiens
  misc feature (653): n equals a,t,g, or c
tcgacccacgcgtccgaatttggctgtggcggcaaatgggcttgggcggctcctcggcgggtggcggtggtggccgtagcggttcctcctggccctgttaatgtcggggccasgccgggggaggatggcgccctagaacccggccttgctggggtaggggcgggaggggacggggtggggaccggccatgtcggaggtgacccggagtctgctgcagcgctggggccagttttaggagaggcgccgacttcgactcttggggccagctggtggaggcgatagacrrgtatcagatattagcaagacatctacaaaaggaggcccaagctcaacacaataattctgaattcacagaagaacaaaagaaaaccataggcaaaattgcaacatgcttgggaattgcgagtgcagctttacagtccacacagtctcaagaagaatttaaactggaggacctgaagaagctagaaccaatcctaaagaatattcttacatataataaagaattcccatttgatgttcagcctgtcccattaagaagattttggcacctggtgaagaagagaatttgggaatttggaagaagatkgaagaagagggtggtgctgggagcagggtctcctgattcyttttcctgcttagagttccccggnacttttatttacccaaggtt

SEQ ID NO: 361 - DNA, 1324 bp, Homo sapiens
cgagagactgcttgctgcggcagagacgccagrggtgcagctccagcagcaatggcagtgacggcgttggcggcgcggacgtggcttggcgtgtggggcgtgaggaccatgcaagcccgaggcttcggctcggatcagtccgagaatgtcgaccggggcgcgggctccatccgggaagccggtggggccttcggaaagagagagcaggctgaagaggaacgatatttccggtgaggctcaccgggtcccaagtccagccctggatctcccaatggccttccaatccttaaactgccaatcgccccacccgttcctacctggtgccttgggcgccccatcccccaacagaactcccgggccccaatccagtataccctaacccttgatgtcccgaccgttgccacgtatagggcactcccagttacctgcacaacagtttcaggcccccaaaccgtttccaccggcgggtctccaaaacaacccacggctcaactcctcctttatcattaccatctcccgcgtggagttctcctcaggtcgtgcgaaacacccccagattcttcgcacagtgtctagatccgaccgcccaacgtttgcctcccagcctgactccctcggcccttacccacctgtcaccccctctacgctctccttcctcgccagcacgccttagctttgcaagcctgcatgcattcaggcttctcaggtgtttctagacccccgactccgcaagagtgaggatgatgggagctggtcatgggagctacttatggttggacaccatcttctaaaggcttttgccctactcagcccaacctagacctgtagatttccctctcctgcttaggagtatggagtgggctgggcctccctttgccagccttgagttatctttaactgacttctgtccactctggagagcagtgaggaattaatcttgcttttgcttgtcctttggcctttcacttctgccttctgttgagaattatcaccatgacacctgccataccgtatagagagccaaggtacagccgttagagactatctaattgagcccctacattttgtagttaaggaaaactgrggcctaaatgtgaccaaaccaacattgtaatccagtcccttcttggaacctaaattgaactgccaagtactgcgcatgcaagagaccctttattggccttacagtgggccattcatttctataggcaaagaaagctctagacagattggaataggaaatggatatttgccttttagctacacccctttgtctgtcttcctcattttgttcctttttttttccctaaaggggagtcaagtt

SEQ ID NO: 362 - DNA, 678 bp, Homo sapiens
  misc feature (14): n equals a,t,g, or c
  misc feature (469): n equals a,t,g, or c
  misc feature (490): n equals a,t,g, or c
  misc feature (658): n equals a,t,g, or c
gcggacgcgtgggncggacgcgtggggtacacatgcacacagattgcttacaatatcagcacgtaaaaggcctttgcacattgaagtcggcactgctttggtgctttttttgttttttggctcggtgttttgactgcaagtctttttggatagaattttatagttagaaagtagctaacacttgggttttataggcacaaaaaacaagtcttatactagctgtactttattttttgagttcttattaatgaggaacatccacttttgcattgacagtgatttcaagattgctttatcagcctttaaaggattcttgactagtcgtgcacatcagaactgccaggtccccagtggttctgaagcagtaagcttgggtgggctctggcatcagcactttcactaagcttcacagataattctggatgcatactccaggcctgaaccactgatcaatttgaaacatgcatancaaagcaaaaaaagttttgtntcaccttttgaaatacagttaactcttttaccatgccagagatcattcagagagacaggtcgttgctccggagtgatacagatctggcagtacccagcccttgtgtgtgtgcgttagtcagcacctgcccacactgcgagccccgtagatgtgcttgtccttcctgtnagattaacacatactggtca

SEQ ID NO: 363 - DNA, 5236 bp, Homo sapiens
gaggccacttccaacatcaaccaatgtgaaaacattgactggctttggtccaggtttagccatggaaactgcccttagaagtcctgatagaccagagtgtattcgactttatgcacctccttttattctggctccagtgaaggacawacagacagagctaggagaaacatttggagaagctggacagaaatataatgttctttttgtgggatactgtttatcacatgatcaaaggtggattcttgcatcttgcacagatctatatggagaacttttagaaacttgtatcattaacatcgatgttccaaatagggctcgtcggaaaaaaagttctgctagaaaatttggtctacagaaactttgggagtggtgcttaggacttgtacaaatgagttcattgccatggagagttgtaattggtcgtctaggaaggattggtcatggagaattgaaagattggagctgtttgctgagtcgtcgaaacttgcagtctctaagtaaaaggctcaaagacatgtgtagaatgtgtggtawatctgctgcagactcccctagcattctcagtgcttgcttggtggcaatggagccgcaaggctcttttgttattatgccagmytctgtgtcaactggttctgtatttggaagaagcacgactctaawtatgcagacatctcagctaaataccccacaggatacatcatgtactcatatacttgtgtttcctacttctgcttctgtgcaagtagcttcagctacttataccactgaaaatttggatttagctttcaatcccaacaatgatggagcagatggaatgggtatctttgatttgktagacacaggagatgatcttgaccctgatatcattaatatccttcctgcttctccaactggttctcctgtacattctccaggatctcattacccccatggaggtgatgcgggcaagggtcagagtactgatcggctactatcaacagaacctcatgaggaagtacctaatattcttcagcaaccattggcccttggttactttgtatcaactgccaaagcaggtccattacctgactggttctggtcagcatgtcctcaagcacaatatcagtgtcccctttttcttaaggcctctttgcacctccacgtgccttcagtgcaatctgacgagctgcttcacagtaamcactcccacccacttgactcaaatcagacttcagatgtcctcaggtttgttttggaacagtacaatgcactctcctggctaacctgtgaccctgcaacccaggacagacgctcatgtctcccaawtcattttgtggtgctgaatcagttatataactttattatgaatatgctgtgatcttcatttgatggaactgtgcaagaaaagaacaaggaaaaatggatgtttcgctgcaggattaagttacaattatcttctcagtgaaggtcatttgtgatggggtctaattcttattacttcaacaaatattgttttgacttggggggaggggctataaccctgctatttttcattgactctattgaactctttaggatgatgactgatcatacaaaacgtattataacattttcgtagcaaaattaaccttttttttttccagtcacagtatttgtgaaaagtaatgagccatagtacccagtcatgttaaatgaatattaaaagcatggagaggaaacatgaggaacaatgaatttcaacatatggcttcagaacatgaagatgttcttgtatggattatagtatctagtattcaaaaatgcctgcatctcttctcttatttattgtaagtttttaaatgtataaattgtcttatatttcttaacctcttttataaaaattttcctagaaggtttatactgccttcttgctttaaagcaattggtctaaaatatatgtaatcgtcttaattaaaaagttgcagtagggttgcttttagagtattatttttttgtaagggggtgggtgggacagtaaatttgtattgtctcgatgtacagtttaacggggatagagggggaataatgtccataccattgtgtgtggaggatttacagctaagctgtagttgcagagtacatgtacagtaatgaagttcactgtgtttataaattgaaaaggtaccaggtcttacagcattttatatatcacatctttacagaataacatgatggcaatatacaagtggtattgttaggtggtttaacttagaataaaatgagaattcttcagttatattttgtactatggtttagggctatgactaatatttcaggccatttccggtgaaagaaacttagttttacaagaaaaaccatttgctactgaatgcttaaactaattttagtgtttaatgttacatgcttaaatttttttcagttttaacagtggcatatttaggcatggaaatattattatgaaatttattttcaggatctgctataaggttgaaatttagcccagctctaggcattttacaaattatttttcaagcagtcattcttgattgtttgacttttttttttaaattaaagattgggaatgtatgtgagagtatgcatatgtatgggtgtgtgtgtgtgcgcgcaatcaaactgtggtgtaaatagattctcagtgaattctggtattcagactctattccactagtgaaagaaccattttttaaacttcccttgccttttttatttatttaattttcttggtttggagatgtcagtcccaaacaccagagtctgtacttttctataacacagctcagattaaggtagggcatatgccaaggaggttctcacctccctaaagaagggacttgaattttagggactttaattcacccctccttcaatacaactttcccccttcttgtttgcacatgccaagataactgcttttatgcaggctgtacccccttgaaaaatcctttctacagtgctgctcacaaaagagcccaagttcgcctcctacctgcattgctgacttgaattcacagtcgccgagtctacctagctttcttggaagcagtctagcaaaatttctatttgtacgttcactaattatctacaaggacaaaatcagttgtatttacaaaactctacttcagtgtttgttttagtttttttttttactgaaacttgtttttgtgaatactctgtgcttagaattaaatatcactttcttatgaacaacataacttcttcagattgtgtatatgaaaacattagcaagtcttgttttttctatgaagcaaacacaattggtgacaaaggttgtcaatcatttcttcaaaattataatgcagttctaatggtcagcatattttgatattaaatttaaagatcacctctctgcatttgtttttaaattatgctaatacaccacacattatgttggtatgttttgttctgtactttctttaaaaaaaaaaaaaaaacttgtctgagatttgaaggaaaatgtgcttatttggaatttccataaaaagagtatcctttttatacacttaatagtgactttacaaaataaaagttatattctcagttgtttaaaatcactaacctatgataaccacayctcaatttgaaagtagatttaaaattattccctgacaggttatttaatatggagccataaggagggaacccagtacacaattattttttatttgggaatcagggaatagttcccaaatatacaggatttattgataagattttttttcttcccttcatatatccattcaaactcaatggaaagttattaaataaccattagaaaagctcagtagacttatttgagaaattaagccttgtgcaggatgatggatttgacttactaatgtactgtcacagacaaatatgggtagttttgtttaaataggtaagcaaaatattatactttatagcagtggattaccaacaccttgacttctttgttacagtgctaacatctttttttttgtgcaggtatccatgattattaagcagggtggaagttcagtattttgtcatttaaaaagattagttatataatgtctgcttccagccagtgagaaacatctagccatacctttcttatgcaagccattgagttatcaggactgtgaattaacactgtatgaataaatttctgtacaccttattgtttggccagaaggccaccaagtgtacttatatgtaatccttaaattttaaagtagctgtaatttttaaatatttctaaacttttcttaaaccactaaaattaagctcttactacttagtcaactatcctcagctgtattcgtactcaattgtcagtatggcacagattactgtattaaaatattctcctttcgtcttcatatttaccttctgaggtaattttttaacttaatgtgttactacaaagatttgcagatctttaatcaagcactatgttaatactgtaatatcagaatactatgttgcattatttaaaatgttcaaattgaatagattaaaaagtttttaaatgctattgcatcatataatttgctattcatccactatggcattgcatatcaatcagttaatacacttaatgttgcatgagtgatattttggtctgggtttcctcttaagattttagtttgtctgaattaaggaaaaatgtttttaatatacattcttattttgtcccacccctccagaaataagctggaaatcttaactttttggggggtcttttttggtgttttaatgggcccagaactgtggtttaaatttttatgtatgtattttcttttttgtggagtataaatttaaaaactggatttgggacctaaaatactcctcaggttgatgtattcatgaagttttaaaacatctttagttttcaaagtaaactggatatgtggaccttaaagttattgagtttaagctacaaattgtaacgtcattactggacatgtcagcatcaaccctctcaaaatagcttggtcactttatgaaggggcgttttaaagttgttgtttagcagtgacatttaatatggtccaattgcttttctttttaacgtgacaaaaagagaataaggaacaaacactattgctgccgaatgccataacactgagttgtacaaattgtgattgaggaaatgaaaaggtttatactttttaaaaaaaaaaaaacaaaaacaaaaaacaaaacttcaaatggaataaattattcatgaagccttcaaaaaaaaaaaaaaaaa

SEQ ID NO: 364 - DNA, 1020 bp, Homo sapiens
ccatccttattgctacagatgtagcctcccgtgggctagatgtggaagatgtcaagtttgtgatcaactatgactatccaaacagctcagaggattatgtgcaccgtattggccgaacagcccgtagcaccaacaagggtaccgcctataccttcttcaccccagggaacctaaaacaggccagagagcttatcaaagtgctggaagaggccaatcaggctatcaatccaaaactgatgcagcttgtggaccacagaggaggcggcggaggcgggggtggtcgttctcgttaccggaccacttcttcagccaacaatcccaatctgatgtatcaggatgagtgtgaccgaagcttcgaggagtcaaggatggtggccggagagactctgcaagctatcgggatcgtagtgaaaccgatagagctggttatgctaatggcagtggctatggaagtccaaattctgcctttggagcacaagcaggccaatacacctatggtcaaggcacctatggggcagctgcttatggcaccagtagctatacagctcaagaatatggtgctggcacttatggagctagtagcaccacctcaactgggagaagttcacagagctctagccagcagtttagtgggataggccggtctgggcagcagccacagccactgatgtcacaacagtttgcacagcctccgggagctaccaatatgataggttacatggggcagactgcctaccaataccctcctcctcctccccctcctcctccttcacgtaaatgaaaccactcaagtggtagtgactccagcagacttaattacattttaaggaacactgtctttcctttttttttcctcttcgccttttctttttttttccttttttctttttttttttttaatttttccccccaaccatcgtgatttgtcttttcatgcagattagttagaattcactgccaggtttcttctgcccaccaaaatgatccagtctggaataacattttgtaaaaaaaaaaaaa

SEQ ID NO: 365 - DNA, 2208 bp, Homo sapiens
ggtcgacccacgcgtccgggggtttcatcatgtttgccaggctggtctcgaactcctggcctcaagtgatccgcccacctcagcctcccaaagtgctgggattacaggcgcgagcaccgcgcctggccaaagatgcaaattcttgtttggatttatgctctgcctcttcccagcattttcttatctgtagccctgcttgcttgagagtatacttggataagaagtattgctgttgagggagctataagaaaaggattcttcttccagaagtaaagaactcatctttagagtacctttaaatgaattttgtttttctttcttattttgaggtggattggtcttctctttttttgggtttccagctcactgggactctcagaccttacctttccagctcaaacaccattagttaaattccttcattctcattagaatgcagcctgctgagtatgtgggtttcactgccggagtccatcatttagccagtatacatagaggaactgcttcgaatcaaggcaactggtgaagggcttagcatgttggcagcaatatcccagagattgaatctgtttgcattttcctcatctagsataacagctgcttgaagccagggctcttagccytttgcattccccttgagcgaggaagccacactgcctttctgtgtctggttcagagctcttccttcttggcatgttttctggactacatgcacatgggcagctatagattaatctgcaaaacctagtcacttacctacccataatatctgggaaggtgtggtatttgttttaaagaaacattgtttctttgggagggcagtttctgtctggactttgaggtggacttagttatccctacagttctttaactctcagcttttaataaaagatgaaatcagatattgatgcagttgggtcacaattctttagaatgcttctaccccagggccgcttcctgttcctagtcatggttttccagtttagtagtggagtttcttgaggctaacttacagaaatttctaactgaaaactttaagagttattgatacttgttttttcagtcagtcacttacatcacctagcctactctctggaatttaaatttatttctctaggctggtcctggaagttgataaccttttggcaaagcttagatttaggagaaggcttgagtccctgttcagcgggtctgtggattctctttgcttatggctctctgcctgcagccctggcagaccatactgtatgtcatggatacccagtggaaatattactgagatgaaacacatttccaagggtatttaaactctcactctgccacctttctaagggtgggaggctggcagagatgctgcaatgcttgataatcatttggccacactgaaatttccaaagggagctcttgccggtgcttaaaaccaaaactcctggacacttagaaaattccatgaatctagcacaaaatatccattcttgcccaagtgtatcccctttctctccagcttaatcttttttttttttttttttttaaagcccaggccaagggtacttttaactggaaactggggaggagggaagaacactagcagggagctaagaggcaggttgctgggtaagccatcctgctcctacctggtgcctgtatctacattgctgagtgctgtgcgccagtgcctttccttcatctgcagatggagcccatctctttccacctgggtgaggagaccctctgctactccaggggtaaaccttaaagaaggtgtcttgaagagcccaaaggacactcacgtgctaaggtgtccattttatgcatctttaaaatattttatttaaaaaaaaaaatagccctgccctgtcttagtgccactaacggcccagttccatccattctgaatggaaaagcggagactgccagcactttccttggtcttccctttgtctcccatgatgtgttgttccctcatccctcccatccatttcactgtgtgtggatggatagcagagggtaccacgcagtccttgaggcagtcctgtgtgattccatgatcagttgtttttgtattttaactattcttccaaaccagcagatgtttggaaattaaggaaaaaattaaattctcatcaatggttgctgttatagttaaatcagtaaagatcttgagtatcaaaaaaaaaaaaaaaaaaaaaaaaaaaaaaaaaaaaaaaa

SEQ ID NO: 366 - DNA, 2755 bp, Homo sapiens
  misc feature (336): n equals a,t,g, or c
acaactgtgactcgatgcagcccgaccgtggcctttgtggaatttccctccagcccccagctgaagaatgatgtgtcggaagaaaaagaccagaagaaaccagaaaatgaaatgagtggaaaggtggagttggtgctgtcacaaaaggtggtaaagccaaaatctccagaacccgaagcaacgctgacatttccatttctggacaaaatgcctgaagccaaccaactacatttgccaaatctcaattctcaagtggattctccaagcagtgagaagtcacctgttaygacaccttttaagttctgggcatgggacccagaagaggagcgcaggcgncaggaaaaatggcaacaggaacaggaacgtttgctccaggagagataccagaaggagcaggacaagctgaaagaagagtgggaaaaggcccaaaaggaggtggaagaggaagaacgcagatactatgaggaggagcgtaagataattgaagacactgtggttccatttactgtttcttcaagttccgctgaccagctgtctacctcttcctccatgactgaaggcagtgggacaatgaataagatagacctgggaaactgtcaagatgaaaaacaagacagaagatggaagaaatcattccagggagatgacagtgacttattgctgaagactagggaaagtgatcgactggaggagaagggcagcctaactgaaggggccttggctcattctgggaaccctgtatcaaaaggagtccatgaagaccatcagctggataccgaggctggggccccacactgtggaacaaacccacagcttgctcaggatccatcccagaatcagcagacatcaaatccaacgcacagttcagaagatgtgaagccaaaaaccctcccgctggataaaagcattaaccatcagatcgagtctcccagtgaaaggcggaagtctataagtggaaagaagctgtgctcttcctgtgggcttcctttgggtaaaggagctgcaatgatcatcgagaccctcaatctctattttcacatccagtgtttcaggtgtggaatttgtaaaggccagcttggagatgcagtgagtgggacggatgttaggattcgaaatggtctcctgaactgtaatgattgctacatgcgatccagaagtgccgggcagcctacaacattgtgacacggctttcaagcttccggatcactcaccatttctttactgagagtgtcccctggcaactgcttaacaaaatcccaagctcaggggcttctcagcatttacctaatttctgaaaggctcttctgaaaggtggtatctgttctttcgtagcacagtgtttatgtttttcctgtttattgttttggttttttttttttttttgcatttgcacagtatacacaaaagaatatggggttgtaatgatcctgaatagctcaaaaaaggttttagcatggtcaaacaggcttatggtttaaaatgtgttattctcttctttgggaattagctaaatgatgcaataaacctgttttgttttagaatgtctaggaattaaacactttatgtttacagaattgagctgcagaaagtgcaagacatgccaatttgagacacacggtcttctaagactgaaggataaatttaatgcatttcagaaactaaacatcacagcaagctctatctctgagctataatttgtttttaatgcaaagacactagtttgataatatatactgtaatcctgaaacatttgtgttacttacctttggaggtagaaattataccaataaattattgcaccgttagtattagattctgtgtaccttggaagttatgtcattaatataggctggttcatcaaataaagcaaaaccttgcaatatcagctagatttacactccgggacgttgcccaaaggtaggaagaaagcagagggaaatatttcagtcatcatttccaaagtcattatcaaaatctgtgaggaagtttaatcttccaaagagtcaatgtcagacatcaggcctctgttgcctgcttctctcgaggcactagattaggagtcttcaataagagacttaacatgaggtatatggaagatgaggcaccgagataagttcatcattaggtgtgagcactgctcacccttgctggcaagttctccttaagggcctgaagcacaggtgtccaaagaaaagcgttaagtccatcttaatagaatctatgtggtatatgatgtggtcagcccctggtctgtgatcagcaagaacctacagcacagattatgccctgcccacttcaatgaatacctactctcctccattctccatcactttttttgctatcaagaactccggaccttgcccatggagaagtttagagaggaactcttgtggagagctggtttattttctgccctgtgcgacgagtttcagctggccaagaaaggagtcaagttattaaaaagcatcacaatgtagatctccaggctggttttktgttttktgttgttawsactggggaakggggctatttatctgcstaaycaagcaatagctggtgcaattgtgagggccatgacacctaagatgtggcttaaaggcgataagttcgtgacgagaatccggctatggatggggggttggaacatggttggggtgttagatccctggggccattatggggttgccccattaacgcaaacgggatggtaggccttctgtggtaaaatccgtgggggtaaacagccgagggtcgt

SEQ ID NO: 367 - DNA, 1964 bp, Homo sapiens
  misc feature (126): n equals a,t,g, or c
gggagcctgagccctgcggaacctcggcgcycggccccaccccgcccgtacctgcacttatttattgttgttatttcttaccgcggagccccgcagtcgggtcctcccgcccgctcccgcgcagcnctagcattctccagtccctcagtcccttcccgcgcggtgcgccgcagccgaggcgatgcgcctcattcagaacatgtgcaccatcgccgagtaccccgcgccgggcaacgccgcggcctccgactgctgtgtgggcgccgccggccgccgcctggtcaagatcgccgtggtgggcgccagcggcgtgggcaagaccgcactggtggtccggttcctcamcaaacgattcatcggtgactatgaaagaaatgcaggtaatctctatactagacaagttcagatagaaggtgaaaccctggctcttcaggttcaagacactccaggtattcaggtccatgagaacagcctgagctgcagtgaacagctgaataggtgcattcgctgggcagatgctgtggtgatcgttttctccatcactgactacaagagctatgaactcatcagccagctccaccagcacgtgcagcagctacacctgggcacccggctgcctgtggtggtcgtggccaacaaagctgacctgttgcacatcaaacaggttgaccctcagcttggactgcagctagccagcatgctaggctgctcattctatgaagtgtctgtcagtgaaaattataatgatgtctacagcgccttccacgtcctctgtaaagaggtcagtcacaaacagcagcctagcagtacacccgagaagcgaagaacctccctcattcccaggcccaagtcacccaacatgcaggacctgaagaggaggtttaagcaagccctctctgccaaagtgaggactgtcacctccgtctgaagcaggaggagcactcaagggggtttggtcttcccaggaagagggcctgaggttctcctagtgcaggaacgttgaatattggcaatgattcctggttccagaaagggctggagcagaagggccaagagggcctgtggaactgctacagaaaaggaagtgttgttctgagcagggggacaggattgatgaggcttgaaagagcccactgagccactctctgaatatgtgaaatgtactctgtgtcttttcctttagagtggggagggggcataatcgtttcggtttctgcattcaactaccttgtaaatggtggtccgttgcagtttcaccaaatgtattgatgtgatttacagtgggaatgaaagaacagattaagcattgataggctttcttttttcccccttttttcttttttctcttttcttctttcttttcctctttttccccaagaggaagaattgcttttctcttaccagtatgatttgtaactctggaacactattcttacagaatgcctttctaacctgaaggatacccagatttctttctttatgtacaagatggaaaatcccctacccctcaaaaacaggttgagtttatgggccagaatattytgtataccagacattggtaagctctcatggtttacaggaaggctctggttccccctcacaggatgagcatgctcagttgggcgtgtgtggaggagctgtgaacttcacgctcttcaaccccagactttgactgtatagttttttgtttttttaactgttccatcaggaaaaaaatgtgtcagttgattttggtgtgacttgtgtaaatggttcatggcaatgacgttgggttgcttcctaggcctggctgagttgtgcctaagggtggctgaaatactaaaacacttatcttacagcaagtgaacaggggctacctgccacatcccctccacagatgcactttaaaaagccactcatgctttggcttaaactgtaattaatttattttatgtacaataaatcgcatttgaaaaagaaaaaaa

SEQ ID NO: 368 - DNA, 3047 bp, Homo sapiens
  misc feature (2971): n equals a,t,g, or c
  misc feature (3027): n equals a,t,g, or c
  misc feature (3036): n equals a,t,g, or c
gccttcacagctccgggcattgggggaacccgagccggctgcgccgggggaatccgtgcgggcgccttccgtcccggtcccatcctcgccgcgctccagcacctctgaagttttgcagcgcccagaaaggaggcgaggaaggagggagtgtgtgagaggagggagcaaaaagctcaccctaaaacatttatttcaaggagaaaagaaaaagggggggcgcaaaaatggctggggcaattatagaaaacatgagcaccaagaagctgtgcattgttggtgggattctgctcgtgttccaaatcatcgcctttctggtgggaggcttgattgctccagggcccacaacggcagtgtcctacatgtcggtgaaatgtgtggatgcccgtaagaaccatcacaagacaaaatggttcgtgccttggggacccaatcattgtgacaagatccgagacattgaagaggcaattccaagggaaattgaagccaatgacatcgtgttttctgttcacattcccctcccccacatggagatgagtccttggttccaattcatgctgtttatcctgcagctggacattgccttcaagctaaacaaccaaatcagagaaaatgcagaagtctccatggacgtttccctggcttaccgtgatgacgcgtttgctgagtggactgaaatggcccatgaaagagtaccacggaaactcaaatgcaccttcacatctcccaagactccagagcatgagggccgttactatgaatgtgatgtccttcctttcatggaaattgggtctgtggcccataagttttaccttttaaacatccggctgcctgtgaatgagaagaagaaaatcaatgtgggaattggggagataaaggatatccggttggtggggatccaccaaaatggaggcttcaccaaggtgtggtttgccatgaagaccttccttacgcccagcatcttcatcattatggtgtggtattggaggaggatcaccatgatgtcccgacccccagtgcttctggaaaaagtcatctttgcccttgggatttccatgacctttatcaatatcccagtggaatggttttccatcgggtttgactggacctggatgctgctgtttggtgacatccgacagggcatcttctatgcgatgcttctgtccttctggatcatcttctgtggcgagcacatgatggatcagcacgagcggaaccacatcgcagggtattggaagcaagtcggacccattgccgttggctccttctgcctcttcatatttgacatgtgtgagagaggggtacaactcacgaatcccttctacagtatctggactacagacattggaacagagctggccatggccttcatcatcgtggctggaatctgcctctgcctctacttcctgtttctatgcttcatggtatttcaggtgtttcggaacatcagtgggaagcagtccagcctgccagctatgagcaaagtccggcggctacactatgaggggctaatttttaggttcaagttcctcatgcttatcaccttggcctgcgctgccatgactgtcatcttcttcatcgttagtcaggtaacggaaggccattggaaatggggcggcrtcacagtccaagtgaacagtgcctttttcacaggcatctatgggatgtggaatctgtatgtctttgctctgatgttcttgtatgcaccatcccataaaaactatggagaagaccagtccaatggcgatctgggtgtccatagtggggaagaactccagctcaccaccactatcacccatgtggacggacccactgagatctacaagttgacccgcaaggaggcccaggagtaggaggctgcagcgcccggctgggacggtctctccataccccagcccctctaactagagtggggagcatgccagaragagctcaatgtacaaatgaatgcctcatggctcttagctgtggtttcttggaccagcggcatggacatttgtcagtttgccttctgacggtagcttttggaggaagattcctgcagccactaatgcattgtgtatgataacaaaaactctggtatgacacattttctgtgatcattgttaattagtgacatagtaacatctgtagcagctggttagtaaacctcatgtgggggtggggtgggggtgtattccttgggggatggtttgggccgaatggggagtggaatatttgacatttttcctgttttaaattctaggatagattttaacatcctttgcggtcccagtccaaggtaggctggtgtcatagtcttctcactcctaatccatgaccactgtttttttcctatttatatcaccaggtagccyactgagttaatatttaagttgtcaatagataagtgtccctgttttgtggcataatataactgaatttcatgagaagatttattccaccaggggtatttcagctttgaaaccaaatctgtgtatctaatactaaccaatctgttggatgtgggttttaaaaaatgtttgctaaactacccaagtaagatttactgtattaaatggcttcgggtctgaaaagcttttttaacytcttgcttaaaatgcgttttattttgataagatacttcaaatagcctccaaaagtgtagatccaatcayttaaataaacctgtatgtatatgcatatgtgtacatgcatatcccctcctgctaaaactcatacacatgcgtgcagattattttccaggttgaacctagaggtggrgagttgatgggggaaataggtttctgaaaaactgatatactttatcatcaaatcaaagtgtttggggataatacctattcctggagaaagagtgacattttctgtcctgtgtggttagcctccctaggctggcaagggatgctcatatgcgtgacaacaaaggtggggagaacatcacgtgctttagaagcagagccgtcctctgccctantcagactttccccaataacctttttcgtgtaatttaacacctgcactggagataancgagagaanggacactggtt

SEQ ID NO: 369 - DNA, 2411 bp, Homo sapiens
  misc feature (2406): n equals a,t,g, or c
  misc feature (2407): n equals a,t,g, or c
gcacttatgaaacacaggtccttgttgctgcagagaagcagttgttttgctggaaggagggagtgcgcgggctgccccgggctcctccctgccgcctcctctcagtggatggttccaggcaccctgtctggggcagggagggcacaggcctgcacatcgaaggtggggtgggaccaggctgcccctcgccccagcatccaagtcctcccttgggcgcccgtggccctgcagactctcagggctaaggtcctctgttgctttttggttccaccttagaagaggctccgcttgactaagagtagcttgaaggaggcaccatgcaggagctgcatctgctctggtgggcgcttctcctgggcctggctcargcctgccctgagccctgcgactgtggggaaaagtatggcttccagatcgccgactgtgcctaccgcgacctagaatccgtgccgcctggcttcccggccaatgtgactacactgagcctgtcagccaaccggctgccaggcttgccggagggtgccttcagggaggtgcccctgctgcagtcgctgtggctggcacacaatgagatccgcacggtggccgccggagccctggcctctctgagccatctcaagagcctggacctcagccacaatctcatctctgactttgcctggagcgacctgcacaacctcagtgccctccaattgctcaagatggacagcaacgagctgaccttcatcccccgcgacgccttccgcagcctccgtgctctgcgctcgctgcaactcaaccacaaccgcttgcacacattggccgagggcaccttcaccccgctcaccgcgctgtcccacctgcagatcaacgagaaccccttcgactgcacctgcggcatcgtgtggctcaagacatgggccctgaccacggccgtgtccatcccggagcaggacaacatcgcctgcacctcaccccatgtgctcaagggtacaccgctgagccgcctgccgccactgccatgctcggcgccctcagtgcagctcagctaccaacccagccaggatggtgccgagctgcggcctggttttgtgctggcactgcactgtgatgtggacgggcagccggcccctgcagcttcactggcacatccagatacccagtggcattgtggagatcaccagccccaacgtgggcactgatgggcgtgccctgcctggcacccctgtggccagctcccagccgcgcttccaggcctttgccaatggcagcctgcttatccccgactttggcaagctggaggaaggcacctacagctgcctggccaccaatgagctgggcagtgctgagagctcagtggacgtggcactggccacgcccggtgagggtggtgaggacacactggggcgcaggttccatggcaaagcggttgagggaaagggctgctatacggttgacaacgaggtgcagccatcagggccggaggacaatgtggtcatcatctacctcagccgtgctgggaaccctgaggctgcagtcgcagaaggggtccctgggcagctgcccccaggcctgctcctgctgggccaaagcctcctcctcttcttcttcctcacctccttctagccccacccagggcttccctaactcctccccttgcccctaccaatgcccctttaagtgctgcaggggtctggggttggcaactcctgaggcctgcatgggtgacttcacattttcctacctctccttctaatctcttctagagcacctgctatccccaacttctagacctgctccaaactagtgactaggatagaatttgatcccctaactcactgtctgcggtgctcattgctgctaacagcattgcctgtgctctcctctcaggggcagcatgctaacggggcgacgtcctaatccaactgggagaagcctcagtggtggaattccaggcactgtgactgtcaagctggcaagggccaggattgggggaatggagctggggcttagctgggaggtggtctgaagcagacagggaatgggagaggaggatgggaagtagacagtggctggtatggctctgaggctccctggggcctgctcaagctcctcctgctccttgctgttttctgatgatttgggggcttgggagtccctttgtcctcatctgagactgaaatgtggggatccaggatggccttccttcctcttacccttcctccctcagcctgcaacctctatcctggaacctgtcctccctttctccccaactatgcatctgttgtctgctcctctgcaaaggccagccagcttgggagcagcagagaaataaacagcatttctgatgccaaaaaaaaaaaaaaaaaaaaaaaaaaaaaaaaaaaaaactcgagggggggcccgtacccaatcgccctacatganngtat

SEQ ID NO: 370 - DNA, 421 bp, Homo sapiens
gttaagagaaagaccaataatccagtagaaaactgggaaaaggtggcatctgcagggtaacaccagggcagcacagaaatcttgctgggatgaggagctgcaaacatgtgtggtcgactttttggccttctgcctcttctactctcagggatgggggattacaactaaagaagttgtcttttggccgggcgtggtggctcacgcctgtaatcccagcactttgggaggccgagggcgggtggatcacaaggtcaggagatcaagaccatcctggctaacacgatgaaaccccgtctctactaaaaaattcaaaaacattggccggcgaggtggcgggcacctgtagtcccagctgctcgggaggcttgaggcagaagaattgtgtgaacccgggaggcggagcttgcagtgagcccagatc

SEQ ID NO: 371 - DNA, 523 bp, Homo sapiens
  misc feature (402): n equals a,t,g, or c
  misc feature (404): n equals a,t,g, or c
  misc feature (440): n equals a,t,g, or c
  misc feature (461): n equals a,t,g, or c
  misc feature (470): n equals a,t,g, or c
  misc feature (481): n equals a,t,g, or c
  misc feature (516): n equals a,t,g, or c
ctaggattgagtgactatatatttatgtcaaacacttattacagtgtctggcacatagtaagtactcaacatatgttggctattttgaagaaaatactacatatgttcatatataatagaggtatttctgggtttttttgttttttgttttttgctttttttgagacggagcttgctctgttgcccaggctggagtgccatggcacgatctcggctcactgcaagctccgcctcccgggttcacgccattctcctgcctcagcctcccgagtagttgggaatacaggcgcccaccaccacgcctgggctaatttttttgtatttttttagtagagacggggatttcactgtgttagccaggatggtctcgatctcctgacctcgtgatccacccacctccgntnccaaagtgctggggattacaggcgtgaccaccgggnctgggcgaagattcctttagnatcctgatncctctctggcnagattaattatataagaataggggccttaatggtncattaat

SEQ ID NO: 372 - DNA, 395 bp, Homo sapiens
  misc feature (205): n equals a,t,g, or c
  misc feature (217): n equals a,t,g, or c
gccacgcccggcttatttcgtatttttagtagagacgggtttccgcatgttggtcaggctggtctggaactcctgacctcaagtgatccacctggctcagcttaccgaagtgctgagattccgggtgtgagccaccgcgcctagccctctaaacttttaaataatcgtgaaatgtatgcgcagctgaagcgaattcagctatttncttctacctttngtgtggaatttaaaatactgaacttgtgagatgaacctggtgggcaccagttctcaaacttcttggtcacaggacgcttgcactctcttaaaatgtactgaggacacctaaaagcttttgctcactgttgtttactactgctatttactaacatagaaattaaacatattaaaatatt

SEQ ID NO: 373 - DNA, 468 bp, Homo sapiens
  misc feature (380): n equals a,t,g, or c
  misc feature (421): n equals a,t,g, or c
  misc feature (449): n equals a,t,g, or c
  misc feature (450): n equals a,t,g, or c
  misc feature (464): n equals a,t,g, or c
gggggtttcaacatgttggccaggctggtctcgaactcctgacctcaggtgatccatccgccttggcctcctaaagtgcagggattacaggcattacccactgtgcccagtcactatagagattattacattacaataaagaaaaaaactttcaggactctcatggagagctgaagtgttcatgaatatcaagcagaacaggagttaactgaatagactcaaccaatagaaaattaaagcaatttttttttttttttgcttaaaagattgctgatcctttttgtttctcagagttaagaaaacttttcttttgagctattttcagcttttaacaattgagtaaagtatattcctgtgaacaaaatttgaagcatatttgnttctctttacccgatttctccagattttggaaactatttgngagtattcttaacttaatggcaatatanntatttgcataagtncaat

SEQ ID NO: 374 - DNA, 499 bp, Homo sapiens
  misc feature (10): n equals a,t,g, or c
  misc feature (265): n equals a,t,g, or c
  misc feature (284): n equals a,t,g, or c
  misc feature (291): n equals a,t,g, or c
  misc feature (319): n equals a,t,g, or c
  misc feature (338): n equals a,t,g, or c
  misc feature (344): n equals a,t,g, or c
  misc feature (350): n equals a,t,g, or c
  misc feature (372): n equals a,t,g, or c
  misc feature (379): n equals a,t,g, or c
  misc feature (397): n equals a,t,g, or c
  misc feature (408): n equals a,t,g, or c
  misc feature (419): n equals a,t,g, or c
  misc feature (430): n equals a,t,g, or c
  misc feature (433): n equals a,t,g, or c
  misc feature (436): n equals a,t,g, or c
  misc feature (438): n equals a,t,g, or c
  misc feature (445): n equals a,t,g, or c
  misc feature (464): n equals a,t,g, or c
  misc feature (480): n equals a,t,g, or c
  misc feature (482): n equals a,t,g, or c
  misc feature (484): n equals a,t,g, or c
  misc feature (486): n equals a,t,g, or c
  misc feature (488): n equals a,t,g, or c
  misc feature (490): n equals a,t,g, or c
  misc feature (491): n equals a,t,g, or c
  misc feature (492): n equals a,t,g, or c
aattcggcanagcaccacacccggctaattttgtattagtagagatggagtttcaccatgttggccaggctggtctcagactcctgggctcaagtaatctccccacctcagcctcccacagggctggctgtcacttgtttttaagttgttaaagtgctcccggggaagctaaacttaacacaggactggtagagacaccaccttcctgtgggtggggctgcctcctacctggagcagcactcatctccacctgggcactccgtgnaaaggggagggagactctntggctgncagatgagggtggccctgtccgtgtgtnccccagggtgggtcaacancatttnttcctnttgccagggttagatggatttnatttttnccggggggaagggaaggngctctggtttnggggatttgtnaatttctgggnaanacnangttttgnaaagaattttttagggttnggtggtgtgtaggaantntncntntnnnaggtttc

SEQ ID NO: 375 - DNA, 493 bp, Homo sapiens
  misc feature (10): n equals a,t,g, or c
  misc feature (33): n equals a,t,g, or c
  misc feature (65): n equals a,t,g, or c
  misc feature (76): n equals a,t,g, or c
  misc feature (162): n equals a,t,g, or c
  misc feature (210): n equals a,t,g, or c
  misc feature (285): n equals a,t,g, or c
  misc feature (313): n equals a,t,g, or c
  misc feature (316): n equals a,t,g, or c
  misc feature (331): n equals a,t,g, or c
  misc feature (359): n equals a,t,g, or c
  misc feature (360): n equals a,t,g, or c
  misc feature (366): n equals a,t,g, or c
  misc feature (370): n equals a,t,g, or c
  misc feature (375): n equals a,t,g, or c
  misc feature (387): n equals a,t,g, or c
  misc feature (391): n equals a,t,g, or c
  misc feature (415): n equals a,t,g, or c
  misc feature (424): n equals a,t,g, or c
  misc feature (452): n equals a,t,g, or c
  misc feature (464): n equals a,t,g, or c
  misc feature (485): n equals a,t,g, or c
  misc feature (486): n equals a,t,g, or c
  misc feature (488): n equals a,t,g, or c
  misc feature (491): n equals a,t,g, or c
aattcggcanagtgtagtcccagttactcgggnggctgaggcaggagaatcgcttgaacccgggnggtggagattncagtgagcccagatcgcaccactgcactccagtctggcaacagaggcaagactccatctcaaaaagaaaagaaaagaagactctgnacctgtactcttgaatacaagtttctgataccactgcactgtctgagnaatttccaaaactttaatgaactaactgacagcttcatgaaactgtccaccaaggtcaagcagagaaaataattnatttccatggggacttaaatggaacttntgnggggttattattttncataatttttttatttggaaatttttgnntggttncttntaaanggtcttggtttncccngattttcagggaaactttttttgntttttaggntttccacagtttacggcaatttgggttnaaatatactttntgggggaccaaaattgggggnntntgnaa

SEQ ID NO: 376 - DNA, 364 bp, Homo sapiens
  misc feature (30): n equals a,t,g, or c
  misc feature (56): n equals a,t,g, or c
  misc feature (134): n equals a,t,g, or c
  misc feature (192): n equals a,t,g, or c
  misc feature (202): n equals a,t,g, or c
  misc feature (203): n equals a,t,g, or c
  misc feature (204): n equals a,t,g, or c
  misc feature (205): n equals a,t,g, or c
  misc feature (206): n equals a,t,g, or c
  misc feature (207): n equals a,t,g, or c
  misc feature (208): n equals a,t,g, or c
  misc feature (209): n equals a,t,g, or c
  misc feature (210): n equals a,t,g, or c
  misc feature (211): n equals a,t,g, or c
  misc feature (212): n equals a,t,g, or c
  misc feature (214): n equals a,t,g, or c
  misc feature (228): n equals a,t,g, or c
  misc feature (271): n equals a,t,g, or c
  misc feature (311): n equals a,t,g, or c
  misc feature (338): n equals a,t,g, or c
  misc feature (354): n equals a,t,g, or c
  misc feature (361): n equals a,t,g, or c
tataaaatgctgaaactccgtctctactanggatacaaaaaatagccaggcctggnggcaggcgcctgtaatcccagctactcgggaggccaaggcaggagaattgctcgaactcagggggtggaggttgcagngagttgagattgtgccattgcactccagcctgggcaacagagcaagactctgtcttangaaaaaaaannnnnnnnnnnangaaaagcaacatantggggtttctgtcaatctgtcctcggctgcccttctcatttgntgatgggaccttgaaagcaagcttgctaggtgccctctgnggctccagcctttaccggaagtgtggngcatgtttttaacttnagggaancgg

SEQ ID NO: 377 - DNA, 152 bp, Homo sapiens
  misc feature (4): n equals a,t,g, or c
  misc feature (12): n equals a,t,g, or c
  misc feature (18): n equals a,t,g, or c
  misc feature (43): n equals a,t,g, or c
  misc feature (83): n equals a,t,g, or c
  misc feature (109): n equals a,t,g, or c
  misc feature (124): n equals a,t,g, or c
  misc feature (125): n equals a,t,g, or c
  misc feature (147): n equals a,t,g, or c
cctnctggaagnctttcntgcacacagacctcagtgggaaggngttgtatttcctagagaatctgttactgatcatgtaaacntgctcacaccgctggtgaagcctgtnacagaactttacctnntgttttcgagcctatgagtgcnctctc

SEQ ID NO: 378 - DNA, 647 bp, Homo sapiens
  misc feature (1): n equals a,t,g, or c
  misc feature (22): n equals a,t,g, or c
  misc feature (25): n equals a,t,g, or c
  misc feature (41): n equals a,t,g, or c
  misc feature (79): n equals a,t,g, or c
  misc feature (80): n equals a,t,g, or c
  misc feature (490): n equals a,t,g, or c
  misc feature (633): n equals a,t,g, or c
  misc feature (647): n equals a,t,g, or c
naggaaatctaagaatctcttntgnaatgccccgcctgcangtaccggtccggaattcccgggtcgacccacgcgtccnngcaaattagatacaaagtaagcagaagaaaagaaataagaattagagcaggaatcaatgaagttgaaaataggaactcaatagagacaatcaacaaagtcaaaagctgattatttgaaaagattaataaaatcaataaacctctaaccaggctaactaagcaaaaagagaaagaacataaattgctaatatcagaaatgaaagagtggacatcactacagatcccatggacattaggaggataataaaggaatgctctgaacaactgtatgctcacatatttgataacctagatgaaatggagcaagtccttgaaagacacaatctgccaaaactcacacaagaagaaatagaccatctgaataggcctatatctattttaaaatttgaatcaataattaataacttttncaaacagaaagcactaggcccagatgtatttgctggtgaattctaccaaacatataaggaagacattataccaattatctataatctcttttggaggatagaagcagaagggaatactttctggcttattttgggagggcagnattactctaatacn

SEQ ID NO: 379 - DNA, 416 bp, Homo sapiens
  misc feature (231): n equals a,t,g, or c
  misc feature (314): n equals a,t,g, or c
  misc feature (359): n equals a,t,g, or c
  misc feature (360): n equals a,t,g, or c
  misc feature (362): n equals a,t,g, or c
  misc feature (368): n equals a,t,g, or c
cggacgcgtgggtttttttttttttttttttcaaagtaaacgcttcgggccccgcgggacactcagctaagagcatcgagggggcgccgagaggcaaggggcggggacgggcggtggctcgcctcgcggcggaccgcccgcccgctcccaagatccaactacgagctttttaactgcagcaactttaatatacgctattggagctggaattaccgcggctgctggcaccanacttgccctccaatggatcctcgttaaaggatttaaagtggactcattccaattacagggcctcgaaagagtcctgtattgtnatttttcgtcactacctccccgggtcgggaatgggtaatttgcgnncntgctgncttccttggatgtgggaaccgtttctcaggtccctctccggaatcgga

SEQ ID NO: 380 - DNA, 310 bp, Homo sapiens
  misc feature (107): n equals a,t,g, or c
  misc feature (157): n equals a,t,g, or c
  misc feature (180): n equals a,t,g, or c
  misc feature (201): n equals a,t,g, or c
  misc feature (269): n equals a,t,g, or c
  misc feature (296): n equals a,t,g, or c
  misc feature (299): n equals a,t,g, or c
  misc feature (301): n equals a,t,g, or c
  misc feature (310): n equals a,t,g, or c
gcactaccatacgtatttcaattaccagtgaaagaagcactccattaacaactctccttgtcagcaccacacttccaactagctttcctggggccagcatagcttcnacacctcctcttgacacaagcacaacttttaccccttctactgacactgnctcaactcccacaattcctgtanccaccaccatatctgtatcantgatcacagaaggaagcacacctgggacaaccatttttattcccagcactcctgtcaccagttctacngctgatgactttcctgcaacaactggngcngnatctacccn

SEQ ID NO: 381 - DNA, 247 bp, Homo sapiens
  misc feature (216): n equals a,t,g, or c
  misc feature (225): n equals a,t,g, or c
  misc feature (226): n equals a,t,g, or c
  misc feature (228): n equals a,t,g, or c
  misc feature (238): n equals a,t,g, or c
gtcctcgctcgccttctggctctgccatgccctgctctgaagagacacccgccatttcacccagtaagcgggcccggcctgcggaggtgggcggcatgcagctccgctttgcccggctctccgagcacgccacggcccccacccggggctccgcgcgcgccgcgggctacgacctgtacagtgcctatgattacacaataccacctatggagaaanggccccccnngnggaacgcatnagatagtgt

SEQ ID NO: 382 - DNA, 197 bp, Homo sapiens
  misc feature (85): n equals a,t,g, or c
  misc feature (132): n equals a,t,g, or c
ccaggctagagtgcagtggctattcacagatgcgaacatagtacactgcagcctccaactcctagcctcaagtgatcctcctgtntcaacctcccaagtaggattacaagcatgcgccgacgatgcccagantccagaactttgtctatcactctccccaacaacctagatgtgaaaacagaataaacttcacccag

SEQ ID NO: 383 - DNA, 418 bp, Homo sapiens
  misc feature (345): n equals a,t,g, or c
  misc feature (372): n equals a,t,g, or c
  misc feature (382): n equals a,t,g, or c
  misc feature (392): n equals a,t,g, or c
  misc feature (405): n equals a,t,g, or c
ggctttacggctgcgagaagacgacagaagggggccaaccgctgtttcagcccctagctggattccaccattgctgcagctgctccacagcccttttcaggacccaaacaaccgcagccgctgttcccaggatggtgatccgtgtatatattgcatcttcctctggctctacagcgattaagaagaaacaacaagatgtgcttggtttcctagaagccaacaaaataggatttgaagaaaaagatattgcagccaatgaagagaatcggaagtggatgagagaaaatgtacctggaaaatagttcgaccagccacaggtttaccccctgccaccttcagattttncaatggaaagccagtatcgcgggggantatggatgcnttccttggangcccagaggaaantaatggcatggta

SEQ ID NO: 384 - DNA, 204 bp, Homo sapiens
  misc feature (23): n equals a,t,g, or c
  misc feature (109): n equals a,t,g, or c
  misc feature (123): n equals a,t,g, or c
  misc feature (156): n equals a,t,g, or c
ctcacggaaagtacccacatttncaaccccctggcctgactttgtaccccgtgctggtggagagaactacaaggagttcagtgagctgctccccaatcgacagggcctnaagaaagccgactnctccttctggtccaagtacatctcgtctctgangacatctgcagatggagccaagggcggagcagtcagcagagagtgaag

SEQ ID NO: 385 - DNA, 436 bp, Homo sapiens
  misc feature (333): n equals a,t,g, or c
  misc feature (351): n equals a,t,g, or c
  misc feature (405): n equals a,t,g, or c
  misc feature (406): n equals a,t,g, or c
  misc feature (408): n equals a,t,g, or c
  misc feature (422): n equals a,t,g, or c
ggttcgtggaaggcgtcaataagaagctcggcctcctgggtgactctctggacatcttcaagggcatccccttcgcagctcccaccaaggccctggaaaatcctcagccacatcctggctggcaagggaccctgaaggccaagaacttcaagaagagatgcctgcaggccaccatcacccaggacagcacctacggggatgaagactgcctgtacctcaacatttgggtgccccagggcaggaagcaagtctcccgggacctgcccgttatgatctggatctatggaggcgccttcctcatggggtccggccatggggccaacttcctcaacnactacctgtatgacggcnaggagatcgccacacgcggaaacgtcatcgtggtcaccttcaactacccgtgtnngnccccttgggttctnacactggggacgcc

SEQ ID NO: 386 - DNA, 257 bp, Homo sapiens
  misc feature (216): n equals a,t,g, or c
  misc feature (222): n equals a,t,g, or c
  misc feature (239): n equals a,t,g, or c
  misc feature (240): n equals a,t,g, or c
  misc feature (242): n equals a,t,g, or c
gcactctgttcttccgccgctccgccgtcgcgtttctctgccggtcgcaatggaagaagagatcgccgcgctggtcattgacaatggctccggcatgtgcaaagctggttttgctggggaacgacgctccccgagccgtgtttccttccatcgtcgggcgccccaagacaccagggcgtcatggtggggcatgggccaaaaaggactcctactttnggcaanaaaagcccaaaacaagnntnggcttccttaaccct

SEQ ID NO: 387 - DNA, 541 bp, Homo sapiens
  misc feature (132): n equals a,t,g, or c
  misc feature (157): n equals a,t,g, or c
  misc feature (299): n equals a,t,g, or c
  misc feature (342): n equals a,t,g, or c
  misc feature (408): n equals a,t,g, or c
  misc feature (418): n equals a,t,g, or c
  misc feature (498): n equals a,t,g, or c
  misc feature (509): n equals a,t,g, or c
  misc feature (513): n equals a,t,g, or c
  misc feature (522): n equals a,t,g, or c
  misc feature (534): n equals a,t,g, or c
ggaaaaacaagtccgtgttctcacagatgctgtcgatgacattacttccattgatgacttcttggctgtctcagagaatcacattttggaagatgtgaacaaatgtgtcattgctctccaagagaaggatgnggatggcctggaccgcacagctggngcaattcgaggccgggcagcccgggtcattcacgtagtcacctcagagatggacaactatgagccaggagtctacacagagaaggttctggaagccactaagctgctctccaacacagtcatgccacgtagaagccagccgnggaagccctcagctcggaccctgcccagcccatggatgagaangagtttatcgatgcttcccgcctggtatatgatggcatccggggacatcaggaaagcagtgctgangataagggancccctgaggagttggatgactctgactttgagacaggaggatttgatgtcagaagcaggacgagcgtccagacagaagangatcagctganagcnggccaaagntgcccgggcgancaaggct

SEQ ID NO: 388 - DNA, 437 bp, Homo sapiens
  misc feature (238): n equals a,t,g, or c
  misc feature (279): n equals a,t,g, or c
  misc feature (357): n equals a,t,g, or c
  misc feature (382): n equals a,t,g, or c
  misc feature (386): n equals a,t,g, or c
  misc feature (418): n equals a,t,g, or c
  misc feature (427): n equals a,t,g, or c
ggcagaactctgggtgtctcaccatggcctggatccctctacttctccccctcctcactctctgcacaggctctgaggcctcctatgagctgacacagccaccctcggtgtcagtgtccccaggacagacggccaggatcacctgctctggagatgcattgccaaagcaatatgcttattggtaccagcagaggccaggccaggcccctgtgcaggtgatatataaagacagtgaganggcctcaaggatccctgagcgaatctctggctccagctcanggacaacagtcacattgaccatccagtggggtccaagcaaaaaacaaagctgaatattactgtcatccacaaacacantgggtttccccatgttgtatcccgnggangaacaactgaacgtcctagttcagcccaaggnccccctccngtactctgtt

SEQ ID NO: 389 - DNA, 435 bp, Homo sapiens
  misc feature (2): n equals a,t,g, or c
  misc feature (13): n equals a,t,g, or c
  misc feature (31): n equals a,t,g, or c
  misc feature (42): n equals a,t,g, or c
  misc feature (62): n equals a,t,g, or c
  misc feature (155): n equals a,t,g, or c
  misc feature (215): n equals a,t,g, or c
  misc feature (234): n equals a,t,g, or c
  misc feature (246): n equals a,t,g, or c
  misc feature (283): n equals a,t,g, or c
  misc feature (350): n equals a,t,g, or c
  misc feature (383): n equals a,t,g, or c
  misc feature (395): n equals a,t,g, or c
  misc feature (417): n equals a,t,g, or c
  misc feature (420): n equals a,t,g, or c
cncaaattcagcnatgaggaagatgggcganactctgatgangagggagctgagggccacanggattcccaatcagcttctggtgaggaacggccccctgaagcagatggcaaaaagggcaactcccccaacagcgaaccgcccactcctaaganggcctgggcagaaacctctcggcctccagagacagagccgggacctcctgccccaaagcntcccctacccccacctcancggggccccgcngggaactggggcccccctggggactacccagatcgtnggggtcttcctgcaagcccccagcaccttgaagttgaggatgaggcttggcggcacgacgaaagcantcgtcttttgaatttccttggcattggacgggnccggcgaaggcnagaagaaaaggcggccgttttnagntcttcgaggggccag

SEQ ID NO: 390 - DNA, 349 bp, Homo sapiens
  misc feature (2): n equals a,t,g, or c
  misc feature (3): n equals a,t,g, or c
  misc feature (22): n equals a,t,g, or c
  misc feature (68): n equals a,t,g, or c
  misc feature (81): n equals a,t,g, or c
  misc feature (113): n equals a,t,g, or c
  misc feature (116): n equals a,t,g, or c
  misc feature (140): n equals a,t,g, or c
  misc feature (151): n equals a,t,g, or c
  misc feature (172): n equals a,t,g, or c
  misc feature (201): n equals a,t,g, or c
  misc feature (234): n equals a,t,g, or c
  misc feature (237): n equals a,t,g, or c
  misc feature (271): n equals a,t,g, or c
  misc feature (273): n equals a,t,g, or c
  misc feature (287): n equals a,t,g, or c
  misc feature (292): n equals a,t,g, or c
  misc feature (323): n equals a,t,g, or c
tnntggtacgcctgcttgtacnggtccggaattcccgggtcgacccactcgtccgccccaacatgggngactcggctgtgnccacacactgggaaccctacactacggaaaanagnggctacctggagatcaccaagaanatgggcagcanctccatgaagtggagcctganaactaacttcctgcgctactggaccctcncctatctggctctgcccacagtgaaccgaccangangccacccctgtgccccccacaggggaactccgangnctctcccgtgctcncccangggtgagtccgaggattgcccccatgctggncaccggtgagtccgggggattcccca

SEQ ID NO: 391 - DNA, 603 bp, Homo sapiens
  misc feature (421): n equals a,t,g, or c
  misc feature (502): n equals a,t,g, or c
  misc feature (506): n equals a,t,g, or c
  misc feature (540): n equals a,t,g, or c
gcctggatatcaccgtgatggtgttccaccattttggaaaagacttccccaagtcggagaagctaagcccagatgccttcatccagatggctttgcagctggcctactacaggatctacggacaggcatgtgccacctatgaaagtgcctccctgcgcatgtttcacctgggccgcaccgacaccatccgctcggcttccatggactcactcacctttgtcaaggccatggatgactccagcgtcacggagcaccagaaggtggagctgctgcggaaggccgtgcaggcccaccgaggctacaccgaccgggccatccgcggggaggcctttgatcgacacctgctgggcctgaagctgcaggccatcgaggacctggtgagcatgcccgacatcttcatggacaccttctacgccatcgncatgcacttcacctcttcacagccaggtcctgcaagacagatgtgcatgtcttcgggcccgtggtcccgacggctacgggnctgntataacccatggaggccacataacttctccctgncggctacacagctgcgcggagacaacgccgccgctgggcatactgagaaggctctggaatctc

SEQ ID NO: 392 - DNA, 479 bp, Homo sapiens
  misc feature (368): n equals a,t,g, or c
  misc feature (385): n equals a,t,g, or c
  misc feature (394): n equals a,t,g, or c
  misc feature (467): n equals a,t,g, or c
attaaccagggactttttgaactcctctttttctggaacacttccctgagtcacgctcagcaataccgctggtaccagatgctgtaccaggctggcgtctttgcctcccgctcttctctccgctgctgtcgcatccgtttcacctgggccctggccctgctgcagtgcctcaacctggtgttcctgctggcagacgtgtggttcggctttctgccaagcatctacctcgtcttcctgatcattctgtatgaggggctcctgggaggcgcactaacggtgaacaccttccacaacatcgccctggagaccagtgatgagcaccgggagtttgcaatggggggcaactgcattttgaaaaatggggattncctgtcggggtctgggnttgctctgnagattccttggcagtctctgaaatcgggtctcagagagtaattacttggaaaggaagtaaaaccaggcaaccnaaaccccatgag

SEQ ID NO: 393 - DNA, 407 bp, Homo sapiens
  misc feature (18): n equals a,t,g, or c
  misc feature (26): n equals a,t,g, or c
  misc feature (30): n equals a,t,g, or c
  misc feature (50): n equals a,t,g, or c
  misc feature (65): n equals a,t,g, or c
  misc feature (120): n equals a,t,g, or c
  misc feature (163): n equals a,t,g, or c
  misc feature (186): n equals a,t,g, or c
  misc feature (251): n equals a,t,g, or c
  misc feature (262): n equals a,t,g, or c
  misc feature (290): n equals a,t,g, or c
  misc feature (315): n equals a,t,g, or c
  misc feature (329): n equals a,t,g, or c
  misc feature (350): n equals a,t,g, or c
  misc feature (361): n equals a,t,g, or c
  misc feature (387): n equals a,t,g, or c
acactagtggttccaaanaattcggncagnagggactagtttcccattgnaggactactacacgnccctcaccgtatgatgacctcacctatggcgagggggaggagaaccccgaccagnccacagacccaggcgctggggccgaaattcccaccagcaccgncgacacctccaactcctccaatncagctccgcctccaggggaaggtgcggatgacttggagggggagttcactgaggaaacgatccgnaaccttgacgngaactactacgacccctactacgacccnaccagctccccggtcggagatcggnccgggaatgccggngaaccaggataccatctatgnagggatttgangacctcggggcgagaaaggccaaaangggggaccattgattttgag

SEQ ID NO: 394 - DNA, 256 bp, Homo sapiens
  misc feature (35): n equals a,t,g, or c
  misc feature (47): n equals a,t,g, or c
  misc feature (53): n equals a,t,g, or c
  misc feature (58): n equals a,t,g, or c
  misc feature (77): n equals a,t,g, or c
  misc feature (106): n equals a,t,g, or c
  misc feature (118): n equals a,t,g, or c
  misc feature (132): n equals a,t,g, or c
  misc feature (144): n equals a,t,g, or c
  misc feature (147): n equals a,t,g, or c
  misc feature (159): n equals a,t,g, or c
  misc feature (165): n equals a,t,g, or c
  misc feature (171): n equals a,t,g, or c
  misc feature (224): n equals a,t,g, or c
  misc feature (246): n equals a,t,g, or c
catgagctggagtcctaggcacagctctaagcctnccttattcgagnccgagntgggnccagccaggcaaccttgtnggtaacgaccacatctacaagttatcgtncacagcccatgncatttgtaataatnttcttcatagtnatnaccctcataatnggtggntttggncaactgactagttccctaataatgggtgccccgatatggggtttgcccgcatnaaacaacataagcttctgactnttaacctcct

SEQ ID NO: 395 - DNA, 642 bp, Homo sapiens
  misc feature (21): n equals a,t,g, or c
  misc feature (36): n equals a,t,g, or c
  misc feature (40): n equals a,t,g, or c
  misc feature (60): n equals a,t,g, or c
  misc feature (136): n equals a,t,g, or c
  misc feature (200): n equals a,t,g, or c
  misc feature (218): n equals a,t,g, or c
  misc feature (238): n equals a,t,g, or c
  misc feature (327): n equals a,t,g, or c
  misc feature (336): n equals a,t,g, or c
  misc feature (343): n equals a,t,g, or c
  misc feature (352): n equals a,t,g, or c
  misc feature (385): n equals a,t,g, or c
  misc feature (390): n equals a,t,g, or c
  misc feature (399): n equals a,t,g, or c
  misc feature (424): n equals a,t,g, or c
  misc feature (434): n equals a,t,g, or c
  misc feature (463): n equals a,t,g, or c
  misc feature (482): n equals a,t,g, or c
  misc feature (604): n equals a,t,g, or c
ggccccagagccaaggcttgncaccctttgggcagngtgnggtgaaggagctgaaccgtntgggggtcctcatcgacttggctcacgtgtctgtggccaccatgaaggccaccctgcagctgtccagagccccggncatcttcagccactcctcggcctacagcgtgtgcgcaagccggcgcaacgtgcctgacgacgtnctgaggctggtgaaacanacagacagcctggtgatggngaacttctacaacaattacatttcctgcaccaacaaggccaacctgtcccaagtggccgaccatctggatcacatcaaggaggtggcangagccaganccgtggnttttggtgnggactttgatggtggtccaagggtccctgaggngctgnaggacgctncaagtatccagacctgatcgctganctgttaagangaactggacggaggcggaaggcaagggcncactggcttgacaacctgntgaggtcttcgaggcttgggaacaagtcaacaaacttacacaggcttccgaggaggagccatccgttggacactggtggttctgcaggaccaatacggtatcttggggcttcagctcatgcntggggtctgtgctcttgttcccggacttgtggttctga

SEQ ID NO: 396 - DNA, 252 bp, Homo sapiens
  misc feature (58): n equals a,t,g, or c
  misc feature (92): n equals a,t,g, or c
  misc feature (222): n equals a,t,g, or c
ggggacatccgctccggctgcaacggtgactctggaggacccctcaactgccccacanaggatggtggctggcaggtccatggcgtgaccanctttgtttctgcctttggctgcaacacccgcaggaagcccacggtgttcactcgagtctccgccttcatcgactggattgaggagaccatagcaagccacttagaaaccaaaggcccaccttggcaattnctgaatcgatcccacatccttgaaattaaa

SEQ ID NO: 397 - DNA, 543 bp, Homo sapiens
  misc feature (317): n equals a,t,g, or c
  misc feature (399): n equals a,t,g, or c
  misc feature (456): n equals a,t,g, or c
  misc feature (497): n equals a,t,g, or c
  misc feature (518): n equals a,t,g, or c
  misc feature (522): n equals a,t,g, or c
  misc feature (530): n equals a,t,g, or c
ggcacgagctcagaatgatttggaacaagttctacgtcaaattggcgataaggaccaaaagatccagaaccttgaagctttattacagaagagtaaagaaaatatttcattactagaaaaagaaagagaggatctttatgcaaaaattcaggctggtgaaggagagactgctgttcttaaccagttacaagaaaaaaaccatacactacaggagcaagtaactcaactaacagagaagctggaagaatcagtcagaaagttcataaacaagcccagggagaatttgcatggaccaggtacaagagcagaagggcacntcttagagctggcacaagaccgtgttccttttccctagaaactagtggttcatggaatttaaattagtccatttaatggaangccagggagaagggtctccccagcttggaccttaccggttaaaggccaaaccggaanttttactttcagccgaggccgcaaaactggttccaagggcnggtcttcagatccatttgggncacngttccaanggctttaccaggt

SEQ ID NO: 398 - DNA, 284 bp, Homo sapiens
  misc feature (5): n equals a,t,g, or c
  misc feature (7): n equals a,t,g, or c
  misc feature (26): n equals a,t,g, or c
  misc feature (45): n equals a,t,g, or c
  misc feature (46): n equals a,t,g, or c
  misc feature (89): n equals a,t,g, or c
  misc feature (129): n equals a,t,g, or c
  misc feature (134): n equals a,t,g, or c
  misc feature (149): n equals a,t,g, or c
  misc feature (204): n equals a,t,g, or c
  misc feature (221): n equals a,t,g, or c
  misc feature (222): n equals a,t,g, or c
  misc feature (238): n equals a,t,g, or c
  misc feature (277): n equals a,t,g, or c
ggcananatgaagcccagacctcctnaccctggaacctgcactgnnttcatcactccctgtccccaatagtgcttatgggggccctganttttccagtaccttcttttctcccaccgggactccccttnaattnagcagcctattcctntcccaagcttcgtggaagctttccccctgcttccttgtaaggccagggaagtgtntgaatgcggagaacagnnactccactgtggcgangggacaggacaggccactacctatgataacgcctgcggnctctttt

SEQ ID NO: 399 - DNA, 427 bp, Homo sapiens
  misc feature (356): n equals a,t,g, or c
  misc feature (369): n equals a,t,g, or c
  misc feature (371): n equals a,t,g, or c
  misc feature (375): n equals a,t,g, or c
  misc feature (379): n equals a,t,g, or c
  misc feature (394): n equals a,t,g, or c
  misc feature (399): n equals a,t,g, or c
  misc feature (415): n equals a,t,g, or c
aattcggcacgaggtgacaagtttttcacatcccataatggcatgcagttcagtacctgggacaatgacaatgataagtttgaaggcaactgtgctgaacaggatggatctggttggtggatgaacaagtgtcacgctggccatctcaatggagtttattaccaaggtggcacttactcaaaagcatctactcctaatggttatgataatggcattatttgggccacttggaaaacccggtggtattccatgaagaaaaccactatggaaggtaaatcccattcaacagactcacaattggaggaaggacagcaacaccacctggggggagccaaacaggtcagaccagagcaccntgcggaaacaggntntgantcantttaccctgagggtngtttntagggaatttactggnaatttctttttg

SEQ ID NO: 400 - DNA, 560 bp, Homo sapiens
  misc feature (7): n equals a,t,g, or c
  misc feature (10): n equals a,t,g, or c
  misc feature (14): n equals a,t,g, or c
gcaagcnganagcnaccctcactaaagggaacaaaagctggagctccaccgcggtgcggccgctctagaactagtggatcccccgggctgcaggaattcggcacgaggaatccggaagaaaagttcaatctggaaacatcaatgctgccaagactattgcagatatcatccgaacatgtttgggacccaagtccatgatgaagatgcttttggacccaatgggaggcattgtgatgaccaatgatggcaatgccattcttcgagagattcaagtccagcatccagcggccaagtccatgatcgaaattagccggacccaggatgaagaggttggagatgggaccacatcagtaattattcttgcaggggaaatgctgtctgtagctgagcacttcctggagcagcagatgcacccaacagtggtgatcagtgcttaccgcaaggcattggatgatatgatcagcaccctaaagaaaataagtatcccagtcgacatcagtgacagtgatatgatgctgaacatcatcaacagctctattactaccaaaggcatcagtcgg

SEQ ID NO: 401 - DNA, 584 bp, Homo sapiens
  misc feature (383): n equals a,t,g, or c
  misc feature (425): n equals a,t,g, or c
  misc feature (448): n equals a,t,g, or c
  misc feature (467): n equals a,t,g, or c
  misc feature (494): n equals a,t,g, or c
  misc feature (565): n equals a,t,g, or c
  misc feature (570): n equals a,t,g, or c
  misc feature (581): n equals a,t,g, or c
  misc feature (582): n equals a,t,g, or c
ggaggcggcggcagcggcggagttggcggcttggagagctcgggagagttccctggaaccagaacttggaccttctcgcttctgtcctccgtttagtctcctcctcggcgggagccctcgcgacgcgcccggcccggagcccccagcgcagatggccgcgtttgaaggatgacctctaggaagaaagtgttgctgaaggttatcatcctgggagattctggagtcgggaagacatcactcatgaaccagtatgtgaataagaaattcagcaatcagtacaaagccacaataggagctgactttctgaccaaggatgtgatggtggatgacaggctagtcacaatgcagatatggggacacagcaggacaggaacggttccagnctctcggtgtggccttctacagaggtgcaaactgctgcgttntggtatttgatgtgactgccccnaacacattcaaaaccctanatagctggagagatgaagtttctcatncaggccagtccccgagatcctgaaaactttccatctggtgggttgggaaacaagattgacttttaaaacanacaantgggcacaaanngg

SEQ ID NO: 402 - DNA, 334 bp, Homo sapiens
  misc feature (12): n equals a,t,g, or c
  misc feature (17): n equals a,t,g, or c
  misc feature (241): n equals a,t,g, or c
  misc feature (277): n equals a,t,g, or c
  misc feature (291): n equals a,t,g, or c
  misc feature (299): n equals a,t,g, or c
  misc feature (332): n equals a,t,g, or c
gatccccggagnaattnacgtccacactcgtttccagatgcctgatcagggaataacgtctgctgatgatttcttccaaggaaccaaggcggccctggctgggggaaccactatgaatcattgaccacgttgttcctgagcctgggacaagcctgctcgctgcctttaaccagtggagggaatgggccgacagcaagtcctgctgtgaactactctctgcatgtggacatcagcgagtggnataagggcatccagggaggagatggaagcgcttgtnaaaggatcacgggngtaaattncttccttggtgttacatgggctttttgaaaagnat

SEQ ID NO: 403 - DNA, 378 bp, Homo sapiens
  misc feature (370): n equals a,t,g, or c
caagcacaagcgggagatttacgaccgctatggccgggaagggctgacagggacaggaactggcccatctcgggcagaagctggcagtggtgggcctggcttcaccttcaccttccgcagccccgaggaggtcttccgggaattctttgggattggagacccttttgcagagctctttgatgacctgggccccttctcaagagcttccagaacggggttcccgacactcaagccccttctttacttctcttcctccttccctgggcatccgattctcctcctcatcttctccttcaatcctgggctggtgctttccctctgtttctactctacacctttgtccaaggaagcccatccccaccccaaatcntgaaaaac

SEQ ID NO: 404 - DNA, 300 bp, Homo sapiens
  misc feature (232): n equals a,t,g, or c
  misc feature (242): n equals a,t,g, or c
  misc feature (260): n equals a,t,g, or c
  misc feature (264): n equals a,t,g, or c
  misc feature (275): n equals a,t,g, or c
ggagagaaatgcttacacacagaaatggccttgtgaaaaagggtaaagaacaaaacacacagcgaagcttttttctcagaatgaagtgtaccctaactagccgaggaagaactatgaacataaagtctgcaacatggaaggtattgcactgcacaggccacattcacgtatatgataccaacagtaaccaacctcagtgtgggtataagaaaccacctatgacctgcttggngctgatttgngaacccattcctcacccntcanatattgaaatncctttacataccaagactttcctca

SEQ ID NO: 405 - DNA, 502 bp, Homo sapiens
  misc feature (10): n equals a,t,g, or c
  misc feature (145): n equals a,t,g, or c
  misc feature (148): n equals a,t,g, or c
  misc feature (167): n equals a,t,g, or c
  misc feature (200): n equals a,t,g, or c
  misc feature (252): n equals a,t,g, or c
  misc feature (285): n equals a,t,g, or c
  misc feature (331): n equals a,t,g, or c
  misc feature (412): n equals a,t,g, or c
  misc feature (424): n equals a,t,g, or c
  misc feature (443): n equals a,t,g, or c
  misc feature (450): n equals a,t,g, or c
  misc feature (453): n equals a,t,g, or c
  misc feature (457): n equals a,t,g, or c
  misc feature (469): n equals a,t,g, or c
  misc feature (479): n equals a,t,g, or c
  misc feature (484): n equals a,t,g, or c
  misc feature (491): n equals a,t,g, or c
aattcggcanagcacagcatggacatgaagggtccccgctcagctcctggggctcctgctgctctggctcccaggtgccgaatgtgacatccagatgacccagtctccttccaccctgtctgcatctgtaggagacagaatcacnatnacttgccgggccagtcagngtattgaaaactggttggcctggtatcagcagnagccagggaaaccccctaaattactcctaatctctgatgcctcctctttggngagtggagtcccatcaaggttcagcggcatggntctgggacggaattcactctcaccatttccagcctgcagctgaagnttttgcaattattactgccaacagtttatagttatccttacattttggccagggcccagtggggtttcaaagaattgtggntgcaccattgtnttaattttcccgcctttgntggggcnttnaatngggactgccctnttgtgtgccntgganaattttntcccgggggcc

SEQ ID NO: 406 - DNA, 289 bp, Homo sapiens
  misc feature (92): n equals a,t,g, or c
  misc feature (237): n equals a,t,g, or c
  misc feature (267): n equals a,t,g, or c
  misc feature (274): n equals a,t,g, or c
  misc feature (275): n equals a,t,g, or c
  misc feature (279): n equals a,t,g, or c
gtacaaatgcaggttcaggatattttggagcagaatgaggctttgaaagctcaaattcagcagttccattcccagatagcagcccagacctncgcttcagttctagcagaagaattacataaagtgattgcagaaaaggataagcagataaaacagactgaagattctttaacaagtgaacgtgatcgtttaacaagtaaagaagaggaacttaaggatatacagaatatgaatttnttattaaaagctgaagtgcagaaattacangccctgnnaaangagcaggctg

SEQ ID NO: 407 - DNA, 434 bp, Homo sapiens
  misc feature (271): n equals a,t,g, or c
  misc feature (285): n equals a,t,g, or c
  misc feature (301): n equals a,t,g, or c
  misc feature (305): n equals a,t,g, or c
  misc feature (323): n equals a,t,g, or c
  misc feature (330): n equals a,t,g, or c
  misc feature (336): n equals a,t,g, or c
  misc feature (356): n equals a,t,g, or c
  misc feature (384): n equals a,t,g, or c
  misc feature (388): n equals a,t,g, or c
  misc feature (405): n equals a,t,g, or c
  misc feature (417): n equals a,t,g, or c
agactacagagtgcatatcatctcctttaaagatcccaatcccatgcatattgatgctaccttcaacatcattggacctggtattgtgctttccaaccctgaccgaccatgtcaccagattgatcttttcaagaaagcaggatggactatcattactcctccaacaccaatcatcccagacgatcatccactctgggatgtcatccaaatggctttccatgaatgtcttaatgctagatgaaaaacgtgttatggtggatgccaatgaaanttccaattcaaaanatgtttgaaaaagctnggtntcctaccattaaaagttnacattcnttatgnccattcccctgggaagaagnttccattggctggacctgcgaatgttcngggnccaaagcaccttacaanccctctttggantgaacaggcctaatgga

SEQ ID NO: 408 - DNA, 458 bp, Homo sapiens
  misc feature (7): n equals a,t,g, or c
  misc feature (15): n equals a,t,g, or c
  misc feature (25): n equals a,t,g, or c
  misc feature (72): n equals a,t,g, or c
  misc feature (91): n equals a,t,g, or c
  misc feature (110): n equals a,t,g, or c
  misc feature (125): n equals a,t,g, or c
  misc feature (166): n equals a,t,g, or c
  misc feature (170): n equals a,t,g, or c
  misc feature (177): n equals a,t,g, or c
  misc feature (180): n equals a,t,g, or c
  misc feature (186): n equals a,t,g, or c
  misc feature (198): n equals a,t,g, or c
  misc feature (204): n equals a,t,g, or c
  misc feature (205): n equals a,t,g, or c
  misc feature (219): n equals a,t,g, or c
  misc feature (243): n equals a,t,g, or c
  misc feature (251): n equals a,t,g, or c
  misc feature (255): n equals a,t,g, or c
  misc feature (261): n equals a,t,g, or c
  misc feature (281): n equals a,t,g, or c
  misc feature (286): n equals a,t,g, or c
  misc feature (301): n equals a,t,g, or c
  misc feature (302): n equals a,t,g, or c
  misc feature (307): n equals a,t,g, or c
  misc feature (322): n equals a,t,g, or c
  misc feature (328): n equals a,t,g, or c
  misc feature (338): n equals a,t,g, or c
  misc feature (347): n equals a,t,g, or c
  misc feature (355): n equals a,t,g, or c
  misc feature (414): n equals a,t,g, or c
  misc feature (432): n equals a,t,g, or c
  misc feature (439): n equals a,t,g, or c
  misc feature (451): n equals a,t,g, or c
  misc feature (455): n equals a,t,g, or c
caaaagncggccacnaaaaggaaantggtagcctgcaggtaccggtccggaattcccgggtcaacccacgcntccgcctgggcgcgcacanggccgcgaaggcgggcagnaggctggggggccgnttgggcaagatcacagggtctggatccaacggggccgtgcncccnagataanccngaagangttcggtggganccatcnnacgccgtgtgtgtngatgtgattcacacatattcttcncccatacntccnccccgntgtttcagaatgacccaagnagtgngccatctggatttcnntccangtggaagaaaagacngcccgnatgtaaaaanatgttcttnccaccatnactgatattgatggaatataggaaagattggttggttttttttctttccctcaccaaanaaacttcttatttttacnccggccncttcccccaccntganggt

SEQ ID NO: 409 - DNA, 546 bp, Homo sapiens
  misc feature (150): n equals a,t,g, or c
  misc feature (244): n equals a,t,g, or c
  misc feature (282): n equals a,t,g, or c
  misc feature (296): n equals a,t,g, or c
  misc feature (302): n equals a,t,g, or c
  misc feature (304): n equals a,t,g, or c
  misc feature (316): n equals a,t,g, or c
  misc feature (317): n equals a,t,g, or c
  misc feature (318): n equals a,t,g, or c
  misc feature (325): n equals a,t,g, or c
  misc feature (334): n equals a,t,g, or c
  misc feature (337): n equals a,t,g, or c
  misc feature (382): n equals a,t,g, or c
  misc feature (396): n equals a,t,g, or c
  misc feature (400): n equals a,t,g, or c
  misc feature (404): n equals a,t,g, or c
  misc feature (416): n equals a,t,g, or c
  misc feature (425): n equals a,t,g, or c
  misc feature (433): n equals a,t,g, or c
  misc feature (436): n equals a,t,g, or c
  misc feature (441): n equals a,t,g, or c
  misc feature (459): n equals a,t,g, or c
  misc feature (484): n equals a,t,g, or c
  misc feature (487): n equals a,t,g, or c
  misc feature (493): n equals a,t,g, or c
  misc feature (497): n equals a,t,g, or c
  misc feature (503): n equals a,t,g, or c
  misc feature (510): n equals a,t,g, or c
  misc feature (513): n equals a,t,g, or c
  misc feature (517): n equals a,t,g, or c
  misc feature (535): n equals a,t,g, or c
  misc feature (546): n equals a,t,g, or c
gaggagagacagaaggaaccggcgacagtggtctcagggccgctccggggggcctcaagaaccggaggcagccccggaggtggtccccgatcccgggctatgctcttggatctgagaaagctgccgcgggcggacacgccagaggaggangccggggaatggccgcggtgtggcagcaagtcttagcagtggacgcgagtttcggacgcagtatatccgcggcgcagccagctgctgcgggaanaatgccaagggtgggcacccccagcgctgcttcgggantacctgaagcttcnggggcntnttgttgggccannnctacggnccctctccnaancaaggagtgctccgtgcctataacaacagcatcgtccggaagtanccgcacttactctnggancggntggaaggacttnggaagaatnatcccccnggnccctnggggggcccgtggggcancctcctttccttttcaaaaaaaaangcnccccanccanggtggnggggggnaanattnaaaccgggggccgtcttnttaaaaaaaan

SEQ ID NO: 410 - DNA, 224 bp, Homo sapiens
  misc feature (170): n equals a,t,g, or c
  misc feature (185): n equals a,t,g, or c
  misc feature (186): n equals a,t,g, or c
  misc feature (201): n equals a,t,g, or c
  misc feature (215): n equals a,t,g, or c
gcgtgaacccaaagtatattgttttggagtctgacttcaccaacaacgtggtgagatgcaacattcactacacaggtcgctacgtttctgcaacaaactgcaaaattgtccaatcctgatctccgggagggacagatggccaatctctccccttccaaagcaggccctgntccccgggcagcctnncgccgaggggcccancccccaacccacangcagggagg

SEQ ID NO: 411 - DNA, 584 bp, Homo sapiens
  misc feature (37): n equals a,t,g, or c
  misc feature (157): n equals a,t,g, or c
  misc feature (471): n equals a,t,g, or c
  misc feature (497): n equals a,t,g, or c
  misc feature (517): n equals a,t,g, or c
  misc feature (523): n equals a,t,g, or c
  misc feature (576): n equals a,t,g, or c
  misc feature (581): n equals a,t,g, or c
ggcaagaaaaggggctttgcctttgtaacctttgacnaccatgactccgtggataagattgtcattcagaaataccatactgtgaatggccacaactgtgaagttagaaaagccctgtcaaagcaagagatggctagtgcttcatccagccaaagangtcgaagtggttctggaaactttggtggtggtcgtggaagtggtttcggtgggaatgacaacttcggtcgtggaggaaacttcagtggtcgtggtggctttggtggcagccgtggtggtggtggatatggtggcagtggggatggctataatggatttggtaatgatggaagcaattttgggaagtggtggaagctacaatgattttggggaattacaacaatcagtcttcaaattttgggaccatgaagggaagaaattttggaagcagaactctggccctatggcggtggaagccaatactttgcaaaaccncgaaaccaggtggctatggcggtccngcacatcagtagctatgcantggcanaaaatttaattaaggaagaatctctactaatctatcactctaaaaacaaaacnctctntca

SEQ ID NO: 412 - DNA, 342 bp, Homo sapiens
  misc feature (171): n equals a,t,g, or c
  misc feature (209): n equals a,t,g, or c
  misc feature (261): n equals a,t,g, or c
  misc feature (307): n equals a,t,g, or c
  misc feature (318): n equals a,t,g, or c
  misc feature (335): n equals a,t,g, or c
  misc feature (341): n equals a,t,g, or c
ggcacgagggaccctgctgctgtccactttggtggctggagccctcagttgtggggtctccacttacgcgcctgatatgtctaggatgcttggaggtgaagaagcaaggcccaacagctggccctggcaggtctccctgcagtacagctccaatggccagtggtaccacanctgcggagggtccctggatagccaacagctgggtcctnacggctgcccactgcatcagttcctccgggatctaccgcgtggatgctgggncagcatgaacctcttacgttggcagagttccggttcgttgggcctncaatgtctttnaagattgttggtgcaanaaggant

SEQ ID NO: 413 - DNA, 568 bp, Homo sapiens
  misc feature (267): n equals a,t,g, or c
  misc feature (370): n equals a,t,g, or c
  misc feature (385): n equals a,t,g, or c
  misc feature (479): n equals a,t,g, or c
  misc feature (528): n equals a,t,g, or c
  misc feature (544): n equals a,t,g, or c
  misc feature (559): n equals a,t,g, or c
gactattctgaaggaactcttaatgaagataggatcaatttttgtccccatacagaactgacattacttttgaggttcacaagctaatcacaaatgctacatcaattattgttctgcaaataatatattaccttgagttgttccaaaggtcttatgtttattggctggaattttccaatagcaatgaggagtcaaggaagagtttcctactcaccggcagcatctggaatagcagaccaactttcctcatgctggggagcaaatcangtgttgcagctaaggggccatgcaagaagagctgcaatggccattcccttcacctggctacctcctctactctacagggcaccgagcccaatggagaaggtgngagtggagaagcagngatgtgatgaattactttgcatgggagagaaatccctccaccatctcaagccccggccactgtgcgagcctgtcgagaagcacagcatttcttnaggtggaaagattataactgtaatgtgagggtaccctatgtctgcaagntcactgactagtgcangagggaagtcagcancctgtggtt

SEQ ID NO: 414 - DNA, 445 bp, Homo sapiens
  misc feature (243): n equals a,t,g, or c
  misc feature (256): n equals a,t,g, or c
  misc feature (341): n equals a,t,g, or c
  misc feature (344): n equals a,t,g, or c
  misc feature (356): n equals a,t,g, or c
  misc feature (370): n equals a,t,g, or c
  misc feature (416): n equals a,t,g, or c
  misc feature (435): n equals a,t,g, or c
  misc feature (442): n equals a,t,g, or c
gcaagatgaaactccttgtgctagctgtgctgctcacagtggccgccgccgacagcggcatcagccctcgggccgtgtggcagttccgcaaaatgatcaagtgcgtgatcccgggggagtgaccccttcttggaatacaacaactacggctgctactgtggcttggggggctcaagcacccccgtggatgaactggacaagtgctgccagacacatgacaactgctatgaccaggccaagaanctggacagctgtnaatttctgctggacaacccgtacacccacacctattcatactcgtgctctggctccgcaatcacctgttaccaccaaaaacaaanatnttaagcctcccnttttgcaacttgcnaaacgcaacctttccatcttgcttttccaaaactcccttttaacanggcccccaaaacctggaanccaaaanttt

SEQ ID NO: 415 - DNA, 213 bp, Homo sapiens
  misc feature (19): n equals a,t,g, or c
  misc feature (24): n equals a,t,g, or c
  misc feature (46): n equals a,t,g, or c
  misc feature (71): n equals a,t,g, or c
  misc feature (104): n equals a,t,g, or c
  misc feature (146): n equals a,t,g, or c
  misc feature (169): n equals a,t,g, or c
  misc feature (171): n equals a,t,g, or c
  misc feature (202): n equals a,t,g, or c
  misc feature (203): n equals a,t,g, or c
ggcgctcgcaagagtacgncagangcccggcagctcggagctccgngaccttgtggcgcatcaggacgcgnctgtccctctgccggggacccagagccgccgcngccgctctgcctcctgcgtgttagcctcctctgcgcgctccngcaggcggccgtgggagccgctngnggcagggacggcgcgaggctgctgctgctgnncccggcccgc

SEQ ID NO: 416 - DNA, 319 bp, Homo sapiens
  misc feature (23): n equals a,t,g, or c
  misc feature (50): n equals a,t,g, or c
  misc feature (53): n equals a,t,g, or c
  misc feature (160): n equals a,t,g, or c
  misc feature (164): n equals a,t,g, or c
  misc feature (213): n equals a,t,g, or c
  misc feature (233): n equals a,t,g, or c
  misc feature (238): n equals a,t,g, or c
  misc feature (263): n equals a,t,g, or c
  misc feature (307): n equals a,t,g, or c
  misc feature (309): n equals a,t,g, or c
ggcagagcccggaaagtccccgncgggtgcagcttggtcggttcgatcgncgncgggaacctgacaccgaccggagttggcgtcccttctccctctccgagtgctgctcctgtcattgtgggcatggacgataccctgttccagttgaagttcacggcgnaganactggtagaaagctggccaagaaggcggtgtaaggactccaaggcgganaggaccaaagtgaagaaggnccttntgcagaaaaatgtagagtgtgcccntgtgtatgccgagaacgacatccgtaagaggaacgaggtgttgnantgggtttcgg

SEQ ID NO: 417 - DNA, 410 bp, Homo sapiens
  misc feature (354): n equals a,t,g, or c
  misc feature (361): n equals a,t,g, or c
  misc feature (364): n equals a,t,g, or c
  misc feature (385): n equals a,t,g, or c
  misc feature (406): n equals a,t,g, or c
gtcggagttgtaacgctccactgactgatagagcgaccggccgaccatggcgcccggagtggcccgcgggccgacgccgtactggaggttgcgcctcggtggcgccgcgctgctcctgctgctcatcccggtggccgccgcgcaggagcctcccggagctgcttgttctcagaacacaaacaaaacctgtgaagagtgcctgaagaacgtctcctgtctttggtgcaacactaacaaggcttgtctggactacccagttacaagcgtcttgccaccggcttccctttgtaaattgagctctgcacgctggggagtttgtgggtgaactttgaggcgctgatcatcaccatgtcngtagtcnggngaacccttctctgggcattgncatctgcttgttgcttgctgnttca

SEQ ID NO: 418 - DNA, 183 bp, Homo sapiens
  misc feature (11): n equals a,t,g, or c
  misc feature (28): n equals a,t,g, or c
  misc feature (34): n equals a,t,g, or c
  misc feature (35): n equals a,t,g, or c
  misc feature (67): n equals a,t,g, or c
  misc feature (104): n equals a,t,g, or c
  misc feature (134): n equals a,t,g, or c
  misc feature (172): n equals a,t,g, or c
  misc feature (176): n equals a,t,g, or c
  misc feature (182): n equals a,t,g, or c
cctgatgctcntgtctctgagccaaggncagganncccagacagagctgcctaatccacgaatcacnctgcccagaaggcaccaatgcctatcggtcctactgntactactttaatgaagaccctgagacctgngttgatgcacgatctctattgccagaacatgaattcangcancctggng

SEQ ID NO: 419 - DNA, 457 bp, Homo sapiens
  misc feature (2): n equals a,t,g, or c
  misc feature (13): n equals a,t,g, or c
  misc feature (43): n equals a,t,g, or c
  misc feature (45): n equals a,t,g, or c
  misc feature (79): n equals a,t,g, or c
  misc feature (311): n equals a,t,g, or c
  misc feature (331): n equals a,t,g, or c
  misc feature (343): n equals a,t,g, or c
  misc feature (396): n equals a,t,g, or c
  misc feature (399): n equals a,t,g, or c
  misc feature (444): n equals a,t,g, or c
  misc feature (457): n equals a,t,g, or c
gnattcccaacanatgattttcaggagttcgccgagatgtgtntntaaatggggtaagcatttcattttatctatttantgtggataaaatcaggctctgatttattttgcagttctgtgataatttttaattatattgacattatcatcttttattttactcctacaatgattatgtgagggaatttcataacatgggaccaccaccaccttggcaaggaatgcccccttacccaggaatggaacaacctccacaccatccttactatcagcaccatgctccacctcctcaagctcatcccccttactcnggacatcatccagtaccacntgaagcaagatncagagataaacgaatttcctgattatgatatgaagggtggatgatttccttcntcncacacaaactgttgtcagtggccggaaaattaaacccgtgaaaanaaaccgggacaan

SEQ ID NO: 420 - DNA, 498 bp, Homo sapiens
  misc feature (247): n equals a,t,g, or c
  misc feature (249): n equals a,t,g, or c
  misc feature (306): n equals a,t,g, or c
  misc feature (320): n equals a,t,g, or c
  misc feature (324): n equals a,t,g, or c
  misc feature (331): n equals a,t,g, or c
  misc feature (338): n equals a,t,g, or c
  misc feature (339): n equals a,t,g, or c
  misc feature (343): n equals a,t,g, or c
  misc feature (375): n equals a,t,g, or c
  misc feature (378): n equals a,t,g, or c
  misc feature (379): n equals a,t,g, or c
  misc feature (380): n equals a,t,g, or c
  misc feature (381): n equals a,t,g, or c
  misc feature (396): n equals a,t,g, or c
  misc feature (403): n equals a,t,g, or c
  misc feature (408): n equals a,t,g, or c
  misc feature (414): n equals a,t,g, or c
  misc feature (422): n equals a,t,g, or c
  misc feature (441): n equals a,t,g, or c
  misc feature (442): n equals a,t,g, or c
  misc feature (452): n equals a,t,g, or c
  misc feature (456): n equals a,t,g, or c
  misc feature (462): n equals a,t,g, or c
  misc feature (463): n equals a,t,g, or c
  misc feature (469): n equals a,t,g, or c
  misc feature (473): n equals a,t,g, or c
  misc feature (488): n equals a,t,g, or c
  misc feature (489): n equals a,t,g, or c
  misc feature (490): n equals a,t,g, or c
  misc feature (498): n equals a,t,g, or c
aattcggcacgaggggaactggcctttctccacaccagccactgcctggccagcggggaagtgatgatcagctccctgggagacgtcaagggcaatggcaaagggggttttgtgctgctggatggggagacgttcgaggtgaaggggacatgggagagacctgggggtgctgcaccgttgggctatgacttctggtaccagcctcgacacaatgtcatgatcagcactgagtgggcagctcccaatntnttacgagatggcttcaaccccgctgatgtggaggctggtgagaatccccccatgtgncagcaggagccttngggnctacatncccttgnntttntggttccaaatctttccacccccacaatttgnctnnnnattgggcccagaatnctaaagnggggntggccntaggattntaccggatggttcagattnnttcaaggggnattnccgganncatttnaatnaaatttgttaacctnnnatccccan

SEQ ID NO: 421 - DNA, 452 bp, Homo sapiens
  misc feature (1): n equals a,t,g, or c
  misc feature (8): n equals a,t,g, or c
  misc feature (26): n equals a,t,g, or c
  misc feature (43): n equals a,t,g, or c
  misc feature (55): n equals a,t,g, or c
nccacttnaggctgcacctactaganctgcacgcctgcgaggntaccggtccggnattcccgggtcgacccacgcgtccggcacggctccgactactccaaggattacctcacagacctcatcaccaatgacagcgtgacttcttccgcacgtccaagaagatgtacccgcacaggccagtcctcatggtcatcagccatgcagccccccacggccctgaggattcagccccacaatattcacgcctcttcccaaacgcatctcagcacatcacgccgagctacaactacgcgcccaacccggacaaacactggatcatgcgctacacggggcccatgaagcccatccacatggaattcaccaacatgctccagcggaaggcttgcagaccctcatgtcggtggacgactccatggagacgatttacaacatgctggttgagacgggcgagt

SEQ ID NO: 422 - DNA, 366 bp, Homo sapiens
  misc feature (168): n equals a,t,g, or c
  misc feature (264): n equals a,t,g, or c
  misc feature (327): n equals a,t,g, or c
  misc feature (348): n equals a,t,g, or c
atgattttcaatgccgagagagttggaggcctcgaggaagagcgggaatccgtgggcccactgcgggaggacttcagtctgagtagcagtgctctcattggcctgctggtcatcgcagtggccattgccacggtcatcgtcatcagcctggtgatgctgaggaaagangcagtatggcaccatcagccacgggatcgtggaggtttgatccaatgctcaccccagaaaaacgtccctgaacaagatgcagaaccatgctatganaacccactaccaatactggacagatcaattaggttgcaggacgcgcacctgcgaggatcagtngccgaaatccacatccgatcnatgcaacacaccgtgcag

SEQ ID NO: 423 - DNA, 81 bp, Homo sapiens
  misc feature (6): n equals a,t,g, or c
  misc feature (32): n equals a,t,g, or c
  misc feature (42): n equals a,t,g, or c
  misc feature (70): n equals a,t,g, or c
gattcntcaacggtcaccaagaaaagaacaanttccttgctncacaaggaccaaaagaagaaacggtgantgatttctggc

SEQ ID NO: 424 - DNA, 383 bp, Homo sapiens
  misc feature (4): n equals a,t,g, or c
  misc feature (7): n equals a,t,g, or c
  misc feature (9): n equals a,t,g, or c
  misc feature (22): n equals a,t,g, or c
  misc feature (24): n equals a,t,g, or c
  misc feature (141): n equals a,t,g, or c
  misc feature (276): n equals a,t,g, or c
  misc feature (292): n equals a,t,g, or c
  misc feature (315): n equals a,t,g, or c
  misc feature (344): n equals a,t,g, or c
  misc feature (359): n equals a,t,g, or c
  misc feature (383): n equals a,t,g, or c
ggtnccngncagtcaccgttcngnattcccggtcgacccaggcgtccggacggctgccagcaccctctctagtccatgccaggctgccttctgcttgccatggctcacctctccaatctcccctaaacccacccctaccanggtgacagaactggttcagcagctgacaggccaggcacctgctcctggggcagcgggtgttggtgctagagctgagctgtgaaggtgacgacgaggacactgccttcccaactctgcactatgagctgtgacaangcagccaacctgtcanctagctcaatggagccccggatnccaagccctgcattgtaagcccacagtangcatcaataaatgcntgttaaaggaaaaaaaaaaaaaan

SEQ ID NO: 425 - DNA, 105 bp, Homo sapiens
  misc feature (34): n equals a,t,g, or c
  misc feature (45): n equals a,t,g, or c
  misc feature (74): n equals a,t,g, or c
  misc feature (77): n equals a,t,g, or c
  misc feature (82): n equals a,t,g, or c
ggtcctgcttctccgcacgccaccttaggcccgnagccgtgccgngtgctcttcagcatgtccttcatcccggnggncgagngattccgacttccccatccacaa

SEQ ID NO: 426 - DNA, 237 bp, Homo sapiens
  misc feature (1): n equals a,t,g, or c
  misc feature (9): n equals a,t,g, or c
  misc feature (56): n equals a,t,g, or c
  misc feature (72): n equals a,t,g, or c
  misc feature (114): n equals a,t,g, or c
  misc feature (198): n equals a,t,g, or c
  misc feature (230): n equals a,t,g, or c
  misc feature (236): n equals a,t,g, or c
nagcccganatggcgagtgtagtgctgccgagcggatcccagtgtgcggcggcacngcggcggcggcgctcncgggctccggctccggcttctgctgttgctcttctccgccgnggcactgaatccccacaggtaatgggtcagaatctgtttacgaaaagacgtgacagtaatcgagggagaggttgcgaaccattnagttgccaagtaaatgaagagtgacgactctntaattna

SEQ ID NO: 427 - DNA, 407 bp, Homo sapiens
  misc feature (22): n equals a,t,g, or c
  misc feature (28): n equals a,t,g, or c
  misc feature (65): n equals a,t,g, or c
  misc feature (127): n equals a,t,g, or c
  misc feature (131): n equals a,t,g, or c
  misc feature (137): n equals a,t,g, or c
  misc feature (164): n equals a,t,g, or c
  misc feature (208): n equals a,t,g, or c
  misc feature (255): n equals a,t,g, or c
  misc feature (320): n equals a,t,g, or c
  misc feature (337): n equals a,t,g, or c
  misc feature (343): n equals a,t,g, or c
  misc feature (354): n equals a,t,g, or c
  misc feature (401): n equals a,t,g, or c
atctaagcaactacgatatctntatggntcaggccaaagtcccgctaagattctccaatgttttnatggtctgagcccccctcctgttcccatctccactgcccctcggccctgtttgtgccctgcntctnaaaggngggggctcagatggtgcggcctgagtntgcggccggcggcatttgggatacacccgtagggacggggtgtntcccaggcctaattccatctttccaccatgacagaaatgcccttttnaaggctggcctccttggcgcctgttccccacggcccccgcagcgtgagccacgatgcttccccanaccccacccattcccgnaacacntacttactgtnttgttggcccagccagagtgaggaaggagtttggtccacatggaganggcggt

SEQ ID NO: 428 - DNA, 235 bp, Homo sapiens
  misc feature (28): n equals a,t,g, or c
  misc feature (34): n equals a,t,g, or c
  misc feature (46): n equals a,t,g, or c
  misc feature (63): n equals a,t,g, or c
  misc feature (110): n equals a,t,g, or c
  misc feature (116): n equals a,t,g, or c
  misc feature (119): n equals a,t,g, or c
  misc feature (121): n equals a,t,g, or c
  misc feature (146): n equals a,t,g, or c
  misc feature (179): n equals a,t,g, or c
  misc feature (197): n equals a,t,g, or c
  misc feature (199): n equals a,t,g, or c
  misc feature (211): n equals a,t,g, or c
  misc feature (212): n equals a,t,g, or c
  misc feature (227): n equals a,t,g, or c
gaagagcactaagatcggaagatgagtnagcttnaccagttacggnaggaggccagtcaactnaagaaccagattcaagaacgccaggaaagcatgtgcagatgcaactntctctnaantncacaaacaacatcgacccagtgggnaagaatccaaatgagacacaaggaggtcactgnggggggcacctgggccangnatctgacggccnngcactgggggcacanactccagg

SEQ ID NO: 429 - DNA, 164 bp, Homo sapiens
  misc feature (4): n equals a,t,g, or c
  misc feature (5): n equals a,t,g, or c
  misc feature (35): n equals a,t,g, or c
  misc feature (38): n equals a,t,g, or c
  misc feature (98): n equals a,t,g, or c
  misc feature (117): n equals a,t,g, or c
  misc feature (139): n equals a,t,g, or c
  misc feature (141): n equals a,t,g, or c
  misc feature (162): n equals a,t,g, or c
ctcnnggaattttcagatgcagagcagcggttcgnggncccaggcgcggtctgggcgactgtgcgtggcgctggaggcgctggcggccgttggccgcngggagggcccaacatctgnaccacgcgaggtgtgagctccngncagcagagcctggtctgagancc

SEQ ID NO: 430 - DNA, 515 bp, Homo sapiens
  misc feature (412): n equals a,t,g, or c
  misc feature (451): n equals a,t,g, or c
  misc feature (474): n equals a,t,g, or c
  misc feature (485): n equals a,t,g, or c
  misc feature (504): n equals a,t,g, or c
  misc feature (513): n equals a,t,g, or c
gatttctttgacccagattgtgtgaccctgtgccagtgggggggttgagggtgggacggtgtccgtgttgttgctttcccaccctgcagcgcactggactgaagagcttccctcttcctactgcagcatgaactgcaagctcccctcagcccatcttgctccctcttcagcccgctgaggagctttcttgggctgcccccatctctcccaacaaggtgtacatattctgcgtagatgctagaccaaccagcttcccagggttcgtcgctgtgaggcgtaagggacatgaattctagggtctcctttctccttatttattcttgtggctacatcatccctggctgtggataagtgcttttgtgtagcaaatgctccctccttaagggtatagggctccctgagtttgggagtngtgaagtactacttaactgctgtcctgcttggctgtcgntatcggtttcttggtgatgttgngctaacaattnagaaagtaccacgggtttnaattcttgngg

SEQ ID NO: 431 - DNA, 310 bp, Homo sapiens
  misc feature (133): n equals a,t,g, or c
  misc feature (199): n equals a,t,g, or c
  misc feature (205): n equals a,t,g, or c
  misc feature (208): n equals a,t,g, or c
  misc feature (230): n equals a,t,g, or c
  misc feature (288): n equals a,t,g, or c
  misc feature (297): n equals a,t,g, or c
  misc feature (300): n equals a,t,g, or c
  misc feature (302): n equals a,t,g, or c
cacaatagaaggagtagataccatcctgaccaggctcaacttatattctgtgtatcgggttgtctttcctgttgtggggcctcagccagtaccatgatctgagaccgaacggcgtgttttttctctaacttgnaaaaataggtcacgggtctagatcacattctcgatccagaggaaggcgatactctcgctcacgcancaggancanggggacgaaggtcaaaggtcancatcttcttcgacggatcaagatctatctcccttcgtaaatccaagatcaactttcantcaagagtntangnttggtttt

SEQ ID NO: 432 - DNA, 205 bp, Homo sapiens
  misc feature (161): n equals a,t,g, or c
  misc feature (198): n equals a,t,g, or c
  misc feature (199): n equals a,t,g, or c
  misc feature (200): n equals a,t,g, or c
  misc feature (204): n equals a,t,g, or c
cctccctggttccctgcccacaggccaggtgggaatccctgggctcagcctactcaggttctcctctgggctcaaagcagggaggcctctctcttcctgaatccgatggaagggtgggaggcctagggcaccttccggtaccttttccaaagatgccttcntccgtccctgcatgacctggggtgagtccttcctcgnnntgtnc

SEQ ID NO: 433 - DNA, 424 bp, Homo sapiens
  misc feature (298): n equals a,t,g, or c
  misc feature (318): n equals a,t,g, or c
  misc feature (321): n equals a,t,g, or c
  misc feature (333): n equals a,t,g, or c
  misc feature (363): n equals a,t,g, or c
  misc feature (395): n equals a,t,g, or c
  misc feature (406): n equals a,t,g, or c
  misc feature (414): n equals a,t,g, or c
tcgacccacgcgtccgtttgcgttgcgtacattgtggctggtgcttggcttttaattcgtgcttgtacttccttttttgacaataaaagagtcaagatagcaccgaggccaggagaaagggaacgtgtaagtttttatatatacagtttccaagccaacttcggggaagccttaacctttttacggggtgggggtggggaggtaaaaagttgtgatctctgagaaaataaccgccactactctggaagtgttcatcagcagttatacaaaaccgtgattttggctgctccctaacaantcgtgattgcatgattcgantgncagtctgtagangaattgggcttgggtgtacgtgtgtttganaactggcaggtgggaaaagcagaacatgtgtnaaaaccagtgntaagcttngtggttgggg

SEQ ID NO: 434 - DNA, 415 bp, Homo sapiens
  misc feature (354): n equals a,t,g, or c
  misc feature (375): n equals a,t,g, or c
  misc feature (378): n equals a,t,g, or c
  misc feature (385): n equals a,t,g, or c
  misc feature (391): n equals a,t,g, or c
gcgaaaaatcagttggcaatatacagtgtgggaactgtactgtgatcattggctaaccaagatgggtgacagtttatgatttcaaagactcaaaggcggcttgagtcctacaatgtcctactcataaaaatggaaagcatggcagcctcaggttgttacagagtactctactccaaagtaaaagttattctctgagaaagtgcttactgccttttctgttctctagtttgcttgtttaaacatttactccacaaaattgctcaaacttacccatctttgaatatctagcctctgggatgagacagatgatctttctccgttttcactttttatagaatacagctacctacccangcaatatgaagattttatttntanaacctgncatttnccttaatgcatttgctatgacttt

SEQ ID NO: 435 - DNA, 612 bp, Homo sapiens
  misc feature (442): n equals a,t,g, or c
  misc feature (477): n equals a,t,g, or c
  misc feature (489): n equals a,t,g, or c
  misc feature (492): n equals a,t,g, or c
  misc feature (523): n equals a,t,g, or c
  misc feature (591): n equals a,t,g, or c
agaggcagctatttctatggctccttttgctgctgaggacactcactgtggctctgtgggatgagagaggcatgggggtgagcacttgaaacactgccttggggccttgggttaggggagcctttgtctttagtgcaggacacacatatgcttacacctacctttatcaccattcgttcatgaatcatgcctagctccatccttgccctgggacctactaggccttcatccaactgggaaatggggagaagcaaagctggcctcatgctcttcagggtcagttcctatctggagttgaccaggcctaccccagttgccattcctgaaaaatctcagctgccaggctgcctttagggtccctgtagacccaggagagttgagagggtgggggacacagagagaatagagaggatgtgggaactggcagagggccggagcgcangagttcaagtggaggaatgctggctttgaaccctntacactgctggntgnatgaccttggacaagcacttcacctttttgnggcttaacatcctcatctataaatggggatctctgaaccttctacctactacttacaggctgtgtgangaccaggagtttggatttgga

SEQ ID NO: 436 - DNA, 520 bp, Homo sapiens
  misc feature (148): n equals a,t,g, or c
  misc feature (156): n equals a,t,g, or c
  misc feature (162): n equals a,t,g, or c
  misc feature (167): n equals a,t,g, or c
  misc feature (173): n equals a,t,g, or c
  misc feature (182): n equals a,t,g, or c
  misc feature (185): n equals a,t,g, or c
  misc feature (227): n equals a,t,g, or c
  misc feature (235): n equals a,t,g, or c
  misc feature (257): n equals a,t,g, or c
  misc feature (259): n equals a,t,g, or c
  misc feature (264): n equals a,t,g, or c
  misc feature (267): n equals a,t,g, or c
  misc feature (283): n equals a,t,g, or c
  misc feature (292): n equals a,t,g, or c
  misc feature (295): n equals a,t,g, or c
  misc feature (300): n equals a,t,g, or c
  misc feature (304): n equals a,t,g, or c
  misc feature (316): n equals a,t,g, or c
  misc feature (323): n equals a,t,g, or c
  misc feature (333): n equals a,t,g, or c
  misc feature (356): n equals a,t,g, or c
  misc feature (360): n equals a,t,g, or c
  misc feature (361): n equals a,t,g, or c
  misc feature (366): n equals a,t,g, or c
  misc feature (379): n equals a,t,g, or c
  misc feature (411): n equals a,t,g, or c
  misc feature (490): n equals a,t,g, or c
  misc feature (499): n equals a,t,g, or c
  misc feature (513): n equals a,t,g, or c
  misc feature (517): n equals a,t,g, or c
  misc feature (519): n equals a,t,g, or c
gctgaggactgactgtctagcttagactgctgtctgcacaagaagaagacttacagatgcttaaggaggatggaggcaaattttcaacccttgtactccaaaagctgagggggagaggggatgggaaacattagggctgggttcatgnaaaggggnccagcnttgtnccgacngaggttaanccntgggaaggttatactttggaggaggacctaagttgctggctngcctgatnttcaaaacccttgcccttgcgngnaccanctnagagactcttaatcanggacaaagnctngctgnctantcaccgattttngattctnaaacaaatgngtcacaaagtaagggattctgangggnntatcncagacaaaactgngctagacatgagggtctatggcttaagagcancagtgctgggcctggagcaacaaattgctttgatgtgcaaaccctttaacaacagtttattcagaagacactttttccnagccaaaangtcctggatgcaanctgncna

SEQ ID NO: 437 - DNA, 472 bp, Homo sapiens
  misc feature (1): n equals a,t,g, or c
  misc feature (2): n equals a,t,g, or c
  misc feature (3): n equals a,t,g, or c
  misc feature (15): n equals a,t,g, or c
  misc feature (38): n equals a,t,g, or c
  misc feature (42): n equals a,t,g, or c
  misc feature (60): n equals a,t,g, or c
  misc feature (69): n equals a,t,g, or c
  misc feature (92): n equals a,t,g, or c
  misc feature (148): n equals a,t,g, or c
  misc feature (306): n equals a,t,g, or c
  misc feature (308): n equals a,t,g, or c
  misc feature (309): n equals a,t,g, or c
  misc feature (317): n equals a,t,g, or c
  misc feature (326): n equals a,t,g, or c
  misc feature (331): n equals a,t,g, or c
  misc feature (333): n equals a,t,g, or c
  misc feature (336): n equals a,t,g, or c
  misc feature (346): n equals a,t,g, or c
  misc feature (348): n equals a,t,g, or c
  misc feature (353): n equals a,t,g, or c
  misc feature (359): n equals a,t,g, or c
  misc feature (365): n equals a,t,g, or c
  misc feature (370): n equals a,t,g, or c
  misc feature (372): n equals a,t,g, or c
  misc feature (376): n equals a,t,g, or c
  misc feature (380): n equals a,t,g, or c
  misc feature (381): n equals a,t,g, or c
  misc feature (391): n equals a,t,g, or c
  misc feature (410): n equals a,t,g, or c
  misc feature (411): n equals a,t,g, or c
  misc feature (421): n equals a,t,g, or c
  misc feature (428): n equals a,t,g, or c
  misc feature (435): n equals a,t,g, or c
  misc feature (436): n equals a,t,g, or c
  misc feature (438): n equals a,t,g, or c
  misc feature (440): n equals a,t,g, or c
  misc feature (441): n equals a,t,g, or c
  misc feature (449): n equals a,t,g, or c
  misc feature (450): n equals a,t,g, or c
  misc feature (469): n equals a,t,g, or c
nnnttcggcagaggnaaaggtgatgagggtgccagagnttgncctggacctcctggtcanataggtctngaagggtctgccaggcccacctngtgaaaaaggtgaaaatggggatgttggtcccatggggccacctggtccttcaggnccaagaggtcctcaaggtcccaatggagctgatggaccacaaggacccccagggtctgtttggttcagttggtggtgttggagaaaagggtgaacctggagtaagcagggaacccagggcctcctggggtaagcaggtgttaggcggtccccaaagtngnnaagaggtngagaaaggnggaangntgntttcaacctngngcttnttgggnacctcncagtngnccangggnnccaccaggtnttgttttggccctaagggnnaacccgggtnctttttngtttttnntngnnattctggnntttttgggggattttgggncct

SEQ ID NO: 438 - DNA, 183 bp, Homo sapiens
  misc feature (15): n equals a,t,g, or c
  misc feature (46): n equals a,t,g, or c
  misc feature (53): n equals a,t,g, or c
  misc feature (73): n equals a,t,g, or c
  misc feature (77): n equals a,t,g, or c
  misc feature (118): n equals a,t,g, or c
  misc feature (132): n equals a,t,g, or c
  misc feature (138): n equals a,t,g, or c
  misc feature (170): n equals a,t,g, or c
  misc feature (178): n equals a,t,g, or c
gcccctggccagaanggagagataggaccttccgggcttactggcncaagagnctttccaggttcaccaggtnccgntgggttgccagggtccatggggtccccaggcaccccatctnttgatcacgggttnacttgnggaccaggcatagttcaaacaatagatgaccnacattgtnccttt

SEQ ID NO: 439 - DNA, 541 bp, Homo sapiens
ctccaccttactaccagacaaccttagccaaaccatttacccaaataaagtataggcgatagaaattgaaacctggcgcaatagatatagtaccgcaaggaaagatgaaaaattataaccaagcataatatagcaaggactaacccctataccttctgcataatgaattaactagaaataactttgcaaggagagccaaagctaagacccccgaaaccagacgagctacctaagaacagctaaaagagcacacccgtctatgtagcaaaatagtgggaagatttataggtagaggcgacaaacctaccgagcctggtgatagctggttgtccaagatagaatcttagttcaactttaaatttgcccacagaaccctctaaatccccttgtaaatttaactgttagtccaaagaggaacagctctttggacactagggaaaaaaccttgtagagagagtaaaaaatttaacacccatagtagggcctaaaagcagccaccaattaagaagcgttcaagcttcaacacccactacctaaaaaa

SEQ ID NO: 440 - DNA, 301 bp, Homo sapiens
  misc feature (232): n equals a,t,g, or c
  misc feature (276): n equals a,t,g, or c
  misc feature (281): n equals a,t,g, or c
  misc feature (286): n equals a,t,g, or c
  misc feature (287): n equals a,t,g, or c
ggttaggaggagctaggctgccatcgggccggtgcagatacggggttgctcttttgctcataagaggggcttcgctggcagtctgaacggcaagcttgagtcaggacccttaattaagatcctcaattggctggagggcagatctcgcgagtagggcaacgcggtaaaaatattgcttcggtgggtgacgcggtacagctgcccaagggcgttcgtaacgggaatgccgaancgtgggaaaaagggagcggtggcggaagacggggatgagctcangacanagccnnaagccaagaagagt

SEQ ID NO: 441 - DNA, 365 bp, Homo sapiens
  misc feature (306): n equals a,t,g, or c
  misc feature (318): n equals a,t,g, or c
  misc feature (357): n equals a,t,g, or c
ggcassaggaactagtctcgagtttttttttttttttgttttttaaaaaataacctagactatgcaaaacatcaaagtgaattttccatgaatgtttttaatattctcatctcaacattgtgatatatgctactaaaaaccttttcatatacatcttacctcatttcaagtgaattattttaatcttkktctctctktccaaaaawttaggaatgtttagtgtaattggawttcgctatcagttcccawccttaagttttgatattcaatatctgatagrwacaytgcatcyttggtcatctaagnwttgkttacaantgtgccaaattatttaggagcwagactttawaaggcwtnaaaaaaac

SEQ ID NO: 442 - DNA, 535 bp, Homo sapiens
  misc feature (7): n equals a,t,g, or c
  misc feature (59): n equals a,t,g, or c
  misc feature (404): n equals a,t,g, or c
  misc feature (416): n equals a,t,g, or c
  misc feature (426): n equals a,t,g, or c
  misc feature (463): n equals a,t,g, or c
  misc feature (472): n equals a,t,g, or c
  misc feature (484): n equals a,t,g, or c
  misc feature (502): n equals a,t,g, or c
  misc feature (504): n equals a,t,g, or c
gtgcgcntcgagttagcaagttcagcacctggatcaaccaggtcatagcctacaactgngctcaccacaggccctccccagctcaacccattaaagacccaggccctgtcccatcatgcattcatgtctgtcttcctggctcaggagaaagaagaggctgttgagggtccgactccctacttggacttctggcacagaaggggctgagtgactccttgagtagcagtggctcttcctagagtagccatgccgaggccggggcccccacccctcctccagggcaaccccttggtcctacagcaagaagccagaactgttgggaatgaatggcagccctccttggagaggcagcctgtttattgattacagaggtaagtttacaaattgattaggctataattaantgcacatttccnccacaggccnggcatgaaggcccagtgggttttcaaaggccacattncaacccctntctgccttaggnccaggccacctgggaagngngacgtagcccaggtttaagtcccagggcatt

SEQ ID NO: 443 - DNA, 387 bp, Homo sapiens
  misc feature (180): n equals a,t,g, or c
  misc feature (248): n equals a,t,g, or c
  misc feature (269): n equals a,t,g, or c
  misc feature (272): n equals a,t,g, or c
  misc feature (350): n equals a,t,g, or c
  misc feature (366): n equals a,t,g, or c
  misc feature (385): n equals a,t,g, or c
  misc feature (386): n equals a,t,g, or c
  misc feature (387): n equals a,t,g, or c
ggccgaagcgccgctcagcgccagcctgccgctccccgggctccactttcactttcggtcctgggggaactaagccggaggcagtggtggtggcggcggcgcaagggtgagggcggccccaaaaccccaggtaggtagagcaagaagatggtgtttctgcccctcaaatggtcccttgcnaccatgtcatttctactttcctcactgttggctctcttaactgtgtccactccttcatggtgtcagancactgaagcatctccaaaacntantgatgggacaccatttccttggaataaaatacgacttcctgaatacgtcatcccagtgcaatataaatctcttgatcnatgcaaaccttaccangctgacttctgggggaacnnn

SEQ ID NO: 444 - DNA, 313 bp, Homo sapiens
  misc feature (81): n equals a,t,g, or c
  misc feature (97): n equals a,t,g, or c
  misc feature (275): n equals a,t,g, or c
  misc feature (276): n equals a,t,g, or c
  misc feature (304): n equals a,t,g, or c
  misc feature (310): n equals a,t,g, or c
  misc feature (311): n equals a,t,g, or c
ggaacttccttaaaatttttctttttatttaaaatcttaccaggctatgtttttatacttattaaatttggatgtagtganatctctctctgtaaanaaacgcttattttctcccctaaatggaatgatgaacgcttcttctctcctctgccatatgcccctttgaaaagttacatgtctctctattacttggcaataatgggaatttttatttctacagttgtattgttttggtctgctccataccctgtaaacatttccattgttctacaaannctgtgttctcttttctgtcaagggtcangtgttnnaa

SEQ ID NO: 445 - DNA, 72 bp, Homo sapiens
  misc feature (20): n equals a,t,g, or c
  misc feature (63): n equals a,t,g, or c
  misc feature (69): n equals a,t,g, or c
  misc feature (70): n equals a,t,g, or c
  misc feature (72): n equals a,t,g, or c
ggcacgagcgagtttttttnttttttttttttttttttttttttttttttttttttttttttntttttnntn

SEQ ID NO: 446 - DNA, 406 bp, Homo sapiens
gctagatcgcgagcggccgcccttttttttttttttttaagtcagaagcccattaaaatagttacaagcattgaacttctttagtattatattaatataaaaacatttttgtatgttttattgtaatcataaatactgctgtataaggtaataaaactctgcacctaatccccataacttccagtatcattttccaattaattatcaagtctgttttgggaaacactttgaggacatttatgatgcagcagatgttgactaaaggcttggttggtagatattcaggaaatgttcactgaataaataagtaaatacattattgaaaagcaaatctgtataaatgtgaaatttttatttgtattagtaataaaacattagtagtttaaacaaaaaaaaaaaaaaaaaa

SEQ ID NO: 447 - DNA, 238 bp, Homo sapiens
  misc feature (50): n equals a,t,g, or c
  misc feature (93): n equals a,t,g, or c
  misc feature (127): n equals a,t,g, or c
  misc feature (150): n equals a,t,g, or c
  misc feature (194): n equals a,t,g, or c
  misc feature (209): n equals a,t,g, or c
  misc feature (218): n equals a,t,g, or c
  misc feature (236): n equals a,t,g, or c
agcaacagttcagagcactgcatcaagtgtactgtgctggaaaggtccgncataggaaatatggtcctccatactcctcagacaacagccttncgaaagcaacctgtccctacctgcagatgattanccatctatgaaccggctgggtangcaacaagtgccatctttcatggagctgagccttaaagatcctncagtcctaaagctgncgggaagangttaggtgggagcagcgntg

SEQ ID NO: 448 - DNA, 536 bp, Homo sapiens
  misc feature (284): n equals a,t,g, or c
  misc feature (305): n equals a,t,g, or c
  misc feature (323): n equals a,t,g, or c
  misc feature (340): n equals a,t,g, or c
  misc feature (345): n equals a,t,g, or c
  misc feature (375): n equals a,t,g, or c
  misc feature (376): n equals a,t,g, or c
  misc feature (395): n equals a,t,g, or c
  misc feature (405): n equals a,t,g, or c
  misc feature (410): n equals a,t,g, or c
  misc feature (421): n equals a,t,g, or c
  misc feature (439): n equals a,t,g, or c
  misc feature (441): n equals a,t,g, or c
  misc feature (460): n equals a,t,g, or c
  misc feature (508): n equals a,t,g, or c
attaaaaggaaaaagacatggccattattccatgtgcttaaatgataatttccttattcagtttcagaagaaaaagaatgaaattgggtaactgtcattgcgttactttatgttgaattgggaaattgtgggcataaagcttaaaatccgtggttttatccaaattgtggaaacccataagttaagttaataaatgcctgccttttgttaataataaattggtaaaagttgcctaaccaaaattaagttcctccaagccacctggaaaaaaagggtaattggantacccctcctttaaaaaaggnaaaggcccaacctttttnggaaggttaagggtggnttttngcctaaaggcccctccagggaaaaaaatanncccggtcccgggaagaaanttttgggttnaaaancccgggttttnggaataaaaaggggaagngntttaacctttcccccgggntttttccccttggggttttcccaaaaaaattttttcccaaagggtttncccaaaaaaattttttaaagggtttttt

SEQ ID NO: 449 - DNA, 84 bp, Homo sapiens
  misc feature (29): n equals a,t,g, or c
  misc feature (56): n equals a,t,g, or c
  misc feature (69): n equals a,t,g, or c
  misc feature (71): n equals a,t,g, or c
  misc feature (79): n equals a,t,g, or c
ttttttttccaaaaatatgtccatatttnaatcatgcctaaagtcccacctggganggttaaggcccgnangcctggancttgg

SEQ ID NO: 450 - DNA, 423 bp, Homo sapiens
tgtctgtgccctgcccccagaggtggagcctacagaggcaggcaggcctccttgagctgtggtgggctccacccagttcgagcttcctggctgctttgtttacctaagcaagcctgggcaatggtgggcgcccctcccacagcctcgctgccgccttgcagtttgatctcagactgctgtgctagcaatcagcgagactccatgggcgtagggccctccgagccaggtgcaggatataatctcctggtgcaccattctttaagcccgtcggaaaagcacagtattagggtgggagtgacccaattttccaggtgccgtctgtcacccctttctttgactaggaaagggacctccctgaccccttgcgcttcccgagtgaagcaatgcctcaacctgcttcggctcacgcacggtgggctgcac

SEQ ID NO: 451 - DNA, 544 bp, Homo sapiens
  misc feature (380): n equals a,t,g, or c
  misc feature (412): n equals a,t,g, or c
  misc feature (418): n equals a,t,g, or c
  misc feature (441): n equals a,t,g, or c
  misc feature (483): n equals a,t,g, or c
  misc feature (485): n equals a,t,g, or c
  misc feature (493): n equals a,t,g, or c
  misc feature (523): n equals a,t,g, or c
  misc feature (542): n equals a,t,g, or c
gaatgctataggaattatggaggaataattagctatttattttcttggttagggaagagatattattagttgtagaagtaattactaacttctacattttttattgtggaaatcaaaaatatatatatgaaaataaaatgttataattgacttcagtgtcccataaaccagcttcaacaattaccaaattgtgaccaatctttacacacatgcacagggttccctcaatatctgtgggcattggttctaggaccacttatggataccaacatctatggatgctcaagtccctgatataaaatggtggactatttgcatatgacctgtgtacatcccgtattatttaaatcatccctagatcacttataatacgtaatacnatgtaaatgccatgtaaatactgttatactgnattaanggaataacaaccaggaaaaatgnacatggtcaagtaccagaccccaattttttttgggggggggnanaatttcanttcccagggcaatttgaaccccatgggccntaggaagctttacccggcntg

SEQ ID NO: 452 - DNA, 432 bp, Homo sapiens
  misc feature (267): n equals a,t,g, or c
  misc feature (402): n equals a,t,g, or c
  misc feature (413): n equals a,t,g, or c
  misc feature (417): n equals a,t,g, or c
  misc feature (421): n equals a,t,g, or c
  misc feature (432): n equals a,t,g, or c
ggataaaccatctccccacttcacatagaagcaaagtgaggcacaaggtgggatagtgatgtgcccagggtcacctggcttctagtgaatgcaggagctgggattccagcccagcctgctgactcactgggctgcacagagctccgctagctctgctgacagctgccactcattggcagggggtgggcctcttgtcttccacacaagggtgaagtggtcctggtgctccttgtctggggtactggggtggggcatcctctgccatanacaagagagacttcacctacctgtgatctccccagcaccttcagtgccccgtgggctgcctggcccacagccgtgagcaagtactgcctggctgggaagccaataccctgatggaacttcggcaatgccctgganaacatccttantggntttngccaacattgn

SEQ ID NO: 453 - DNA, 90 bp, Homo sapiens
  misc feature (35): n equals a,t,g, or c
  misc feature (49): n equals a,t,g, or c
  misc feature (76): n equals a,t,g, or c
  misc feature (81): n equals a,t,g, or c
  misc feature (83): n equals a,t,g, or c
gggtggcttgcaggggaagtgcttccgcctgtctncccgcctgggcctntcagcacgagcttgaggaaaaccacantgccntnagatcca

SEQ ID NO: 454 - DNA, 500 bp, Homo sapiens
  misc feature (184): n equals a,t,g, or c
  misc feature (279): n equals a,t,g, or c
  misc feature (349): n equals a,t,g, or c
  misc feature (372): n equals a,t,g, or c
  misc feature (441): n equals a,t,g, or c
  misc feature (457): n equals a,t,g, or c
  misc feature (458): n equals a,t,g, or c
  misc feature (465): n equals a,t,g, or c
  misc feature (466): n equals a,t,g, or c
ggtaagtacgacagaagggtacggctgcgtagaagacgacagaaggggtctgctttccaactgcctgactgcttgttcgtctcactggtgtgagctccagcatcccctttgctcgaaatggaccccaactgctcttgcgccactggtggctcctgcacgtgcgccggctcctgcaagtgcaaanagtgcaaatgcacctcctgcaagaagagctgctgttcctgctgccccgtgggctgtgccaagtgtgcccagggctgcgtctgcaaaggggcatcngaaaaatgcagctgctgtgcctgatgtgggaacagctcttctcccagatgttaatagaacaacctgcacnacctggatttttttaaaaatacnacactgaaccattgctggcatttcctttttatactaaatatgtgactgaacaataaaaacattttgacntttaaaaaaaaaaaannaaatttnnaaaaaaaaaaaaaacccggggcccccaaaaaaca

SEQ ID NO: 455 - DNA, 635 bp, Homo sapiens
  misc feature (5): n equals a,t,g, or c
  misc feature (178): n equals a,t,g, or c
  misc feature (380): n equals a,t,g, or c
  misc feature (392): n equals a,t,g, or c
  misc feature (438): n equals a,t,g, or c
  misc feature (517): n equals a,t,g, or c
  misc feature (518): n equals a,t,g, or c
  misc feature (555): n equals a,t,g, or c
  misc feature (557): n equals a,t,g, or c
  misc feature (569): n equals a,t,g, or c
  misc feature (618): n equals a,t,g, or c
  misc feature (631): n equals a,t,g, or c
gggcngattattttatattagtattaaaaatcaaaccctatgtttctttcagatgaatcttccaaagtggattatattaagcaggtattagatttaggaaaacctttccatttcttaaagtattatcaagtgtcaagatcagcaagtgtccttaagtcaaacaggttttttttgttgntgtttttgctttgtttccttttttagaaagttctagaaaataggaaaacgaaaaatttcattgagatgagtagtgcatttaattattttttaaaaaactttttaagtacttgaattttatatcaggaaaacaaagttgttgagccttgcttcttccgttttgccctttgtctcgctccttattctttttttggggggagggntatttgcttttntatcttcctggcataatttccattttattcttctgagtgtctatgntaacttccctctatcccgcttataaaaaaattctccaacaaaaatacttggtgacttgatggtttatcacttctctaannaaggtgaaataccctaatggaagctactggttttaangnaaagggtaaacntgaaaagaaatcttaatcacggggccaaattaattttctaaccccatgngtaaaaaatattnaaat

SEQ ID NO: 456 - DNA, 317 bp, Homo sapiens
  misc feature (86): n equals a,t,g, or c
  misc feature (203): n equals a,t,g, or c
  misc feature (210): n equals a,t,g, or c
  misc feature (245): n equals a,t,g, or c
  misc feature (267): n equals a,t,g, or c
  misc feature (303): n equals a,t,g, or c
  misc feature (305): n equals a,t,g, or c
  misc feature (316): n equals a,t,g, or c
gcggacgcgtgggccgccttggaccgcagttgccggccaggaatcccagtgtcacggtggacacgcctccctcgcgcccttgccgnccacctgctcacccagctcaggggctttggaattctgtggccacactgtgaggagatcggttctgggtcggaggctacaggaagactcccactccctgaaatctggagtgaagaacngccgccntccagccaccattccaaggaggtgcatgagaacanctctgtgataccatttaacttngttgacattacttttatttgaaggaacgtatattanancttactttgcna

SEQ ID NO: 457 - DNA, 322 bp, Homo sapiens
  misc feature (276): n equals a,t,g, or c
  misc feature (297): n equals a,t,g, or c
  misc feature (316): n equals a,t,g, or c
  misc feature (317): n equals a,t,g, or c
  misc feature (319): n equals a,t,g, or c
gtgcatttatttgaaatgtctgtaagtctctttccatctacagagtttagcacatttgaacgttgctggttgaaatcccgaggtgtcatttgacatggttctctgaacttatctttcctataaaatggtagttagatctggaggtctgattttgtggcaaaaatacttcctaggtggtgctgggtacttcttgttgcatcctgtcaggaggcagataatgctggtgcctctctattggtaatgttaagactgctgggtgggtttggagttcttggntttaatcattcattacaaagntcaacattttacctgacgnntnaag

SEQ ID NO: 458 - DNA, 161 bp, Homo sapiens
  misc feature (33): n equals a,t,g, or c
  misc feature (93): n equals a,t,g, or c
  misc feature (99): n equals a,t,g, or c
  misc feature (118): n equals a,t,g, or c
  misc feature (142): n equals a,t,g, or c
  misc feature (161): n equals a,t,g, or c
gagaaaactaggcaatgtactcttccgatgttngtgtcacacaacactgatgtgacttttatatgctttatctcacatctggtttctaagagntttggngggcggggctgacaccacntgcagtatctcaagatattcaggnggccagaagagcttgtcan

SEQ ID NO: 459 - DNA, 485 bp, Homo sapiens
  misc feature (215): n equals a,t,g, or c
  misc feature (385): n equals a,t,g, or c
  misc feature (424): n equals a,t,g, or c
  misc feature (446): n equals a,t,g, or c
  misc feature (450): n equals a,t,g, or c
  misc feature (457): n equals a,t,g, or c
  misc feature (477): n equals a,t,g, or c
ggcacgagagcccggaaagggggcgtccccatgagcgggcccggagccgggagcgggacctcagccgggaccggagccgtggccggagcctggagcggggcctggaccaagaccatgcgcgcacccgagaccgcagccgtggccggagcctggagcggggcctggaccacgactttgggccatcccgggaccgggaccgtgaccgcagccgcggnccggagcattgaccaggactacgagcgagcctatcaccgggccttacgacccagactacgagcgggcttacagcccgggagttacaggcgcggggcccgccacgatgcccgctcttcggggaaccccgaaagccgcagccgcgaagcacccgcattcaaggagccccagncccgagcttaaggggcggcggggcccatcgggttcttcntgatgaaaagcagaggaacganattntgttttncggtttggattaaattttcntaaggatt

SEQ ID NO: 460 - protein, 65 aa, Homo sapiens
AINWNSTSLEFSKGVWEGSYTSSMKGSLSVTKLQIHKPFVSPNLLGMNPTYIFICVQATWFSLCY

SEQ ID NO: 461 - protein, 344 aa, Homo sapiens
IRHERKPSRAPLAMETVISSDSSPAVENEHPQETPESNNSVYTSFMKSHRCYDLIPTSSKLVVFDTSLQVKKAFFALVTNGVRAAPLWDSKKQSFVGMLTITDFINILHRYYKSALVQIYELEEHKIETWREVYLQDSFKPLVCISPNASLFDAVSSLIRNKIHRLPVIDPESGNTLYILTHKRILKFLKLFITEFPKPEFMSKSLEELQIGTYANIAMVRTTTPVYVALGIFVQHRVSALPVVDEKGRVVDIYSKFDVINLAAEKTYNNLDVSVTKALQHRSHYFEGVLKCYLHETLETIINRLVEAEVHRLVVVDENDVVKGIVSLSDILQALVLTGGEKKP

SEQ ID NO: 462 - protein, 85 aa, Homo sapiens
ILIYFYFMALKYNKSVNYVFYISSSLRLGHFISVDIIVSIILQDKKHLLTTCGLKYRPTLCSNIMLIIFLAVLHSGGPNWIRLLH

SEQ ID NO: 463 - protein, 53 aa, Homo sapiens
  SITE (45): Xaa equals any of the naturally occurring L-amino acids
LISCPMEVLAVSISLIFVSPNMLVQIRVSHIFLTASNFYLKWYWXLVSVQNIL

SEQ ID NO: 464 - protein, 160 aa, Homo sapiens
GFTAARRRQKGVSGLLLCQAGGVLVSSFVMAAAVAMETDDAGNRLRFQLELEFVQCLANPNYLNFLAQRGYFKDKAFVNYLKYLLYWKDPEYAKYLKYPQCLHMLELLQYEHFRKELVNAQCAKFIDEQQILHWQHYSRKRMRLQQALAEQQQQNNTSGK

SEQ ID NO: 465 - protein, 42 aa, Homo sapiens
SPSFLCIKVIISEEHRNFSLFREGKLIENLACSTNKYSCCKY

SEQ ID NO: 466 - protein, 54 aa, Homo sapiens
RKHLEKMTHWFHRNPLKATAPVSFNYYGVVTGPSASKICNDLRSSRARLLETVH

SEQ ID NO: 467 - protein, 49 aa, Homo sapiens
ANGQYVQLACTSSTGLVVWVLLMLGNSFCHNHFTYFFLYCFIIANSFSL

SEQ ID NO: 468 - protein, 126 aa, Homo sapiens
  SITE (1): Xaa equals any of the naturally occurring L-amino acids
XGGGRCQVPASHRNGPAGAGRLPTPPTKEGAPESACASIHLSVQSRHPCLSKALTKTPAPGWPCADLTQGMFTWCSGREGKGPGRGHGRRVAATRRRPGRPGTQSRMTTHLHATASPECIWNQSLN

SEQ ID NO: 469 - protein, 76 aa, Homo sapiens
  SITE (70): Xaa equals any of the naturally occurring L-amino acids
DRVNRGMPDVHGFWQSRGHISIIAMLVPPPSEHSGEGCEGSCDLDLRSPDRNLDATGSRPGLRLGLVDGXLTVFAD

SEQ ID NO: 470 - protein, 193 aa, Homo sapiens
  SITE (52): Xaa equals any of the naturally occurring L-amino acids
  SITE (154): Xaa equals any of the naturally occurring L-amino acids
  SITE (167): Xaa equals any of the naturally occurring L-amino acids
GPGLGGWSSISSPRGCRDSGRSVAAITDFLWDKRTGLAARTMPHPRRYHSSXRGSRGSYREHYRSRKHKRRRSRSWSSSSDRTRRRRREDSYHVRSRSSYDDRSSDRRVYDRRYCGSYRRNDYSRDRGDAYYDTDYRHSYEYQRENSSYRSQRXAGEAQTAEEAHGXFSRSSSVSASPGPSSPHSSAGPLGLW

SEQ ID NO: 471 - protein, 111 aa, Homo sapiens
  SITE (105): Xaa equals any of the naturally occurring L-amino acids
PAPGRGPPMAGAAPTTAFGQAVIGPPGSGKTTYCLGMSEFLRALGRRVAVVNLDPANEGLPYECAVDVGELVGLGDVMDALRLGPNGGLLYFMEYLEANLDWLRXKLEPLR

SEQ ID NO: 472 - protein, 65 aa, Homo sapiens
  SITE (41): Xaa equals any of the naturally occurring L-amino acids
  SITE (63): Xaa equals any of the naturally occurring L-amino acids
KEGEKSATLVLLFCVYNFLKKICVLLLITTLVCPSAFFFFXKTGSHSIGQAGVQWCNHSSLQXCP

SEQ ID NO: 473 - protein, 283 aa, Homo sapiens
  SITE (182): Xaa equals any of the naturally occurring L-amino acids
GRGGRGWWGFWTEPLRVRADPVSGCGGKMAELRVLVAVKRVIDYAVKIRVKPDRTGVVTDGVKHSMNPFCEIAVEEAVRLKEKKLVKEVIAVSCGPAQCQETIRTALAMGADRGIHVEVPPAEAERLGPLQVARVLAKLAEKEKVDLVLLGKQAIDDDCNQTGQMTAGFLDWPQGTFASQVXLEGDKLKVEREIDGGLETLRLKLPAVVTADLRLNEPRYATLPNIMKAKKKKIEVIKPGDLGVDLTSKLSVISVEDPPQRTAGVKVETTEDLVAKLKEIGRI

SEQ ID NO: 474 - protein, 521 aa, Homo sapiens
  SITE (54): Xaa equals any of the naturally occurring L-amino acids
  SITE (199): Xaa equals any of the naturally occurring L-amino acids
  SITE (272): Xaa equals any of the naturally occurring L-amino acids
CLTKLLPCFLEHNMKRDEDLHKAAKEMPFQGSGKSAWCPVEISKTVLWPESISXVRCVELFEAPVECEEEEEVEEEKGSFCASPESSRDDFQEGREGIVARLTESLFLDLLGEENGGFCQQDMGESCLLPPSGSTSAHMPWDEFPSAGPKEAPPWGKEQPLHLEPSPPASPTQSPDNLTCTETPLVIAGNPAYRSFSNXLSQSPCPRELGPDPLLARHLEEVEPEMPCVPQLSEPTTVPQPEPETWEQILRRNVLQHGAAAAPVSAPTSGYXEFVHAVEQGGTQASAVVGLGPPGEAGYKAFSSLLASSAVSPEKCGFGASSGEEGYKPFQDLIPGCPGDPAPVPVPLFTFGLDREPPRSPQSSHLPSSSPEHLGLEPGEKVEDMPKPPLPQEQATDPLVDSLGSGIVYSALTCHLCGHLKQCHGQEDGGQTPVMASPCCGCCCGDRSSPPTTPLRAPDPSPGGVPLEASLCPASLAPSGISEKSKSSSSFHPAPGNAQSSSQTPKIVNFVSVGPTYMRVS

SEQ ID NO: 475 - protein, 245 aa, Homo sapiens
  SITE (163): Xaa equals any of the naturally occurring L-amino acids
PVSYHPRMCTGGCARCLGGTLIPLAFFGFLANILLFFPGGKVIDDNDHLSQEIWFFGGILGSGVLMIFPALVFLGLKNNDCCGCCGNEGCGKRFAMFTSTIFAVVGFLGAGYSFIISAISINKGPKCLMANSTWGYPFHDGDYLNDEALWNKCREPLNVVPWXSDPLLHPAGRRRNPDGSLRHPGGQWPPGDPLWGLPVLWLLWGRWTRLNLRDELLRLYSMTTTISFHKTSSLLGIINSYLLPS

SEQ ID NO: 476 - protein, 76 aa, Homo sapiens
  SITE (54): Xaa equals any of the naturally occurring L-amino acids
MIYHPAFIKYVFDNWLQGHGRYPSTGILSVIFSMHVCDEVDLYGFGADSKGNWXPLLGEQPIRGGFSQDGGARCRL

SEQ ID NO: 477 - protein, 176 aa, Homo sapiens
  SITE (12): Xaa equals any of the naturally occurring L-amino acids
  SITE (169): Xaa equals any of the naturally occurring L-amino acids
SQFRMGWTWTAXSLAPQRLMSVLNPCQNYTLLDEPFRSTENSAGSQGCDKNMSGWYRFVGEGGVRMSETCVQVHRCQTDAPMWLNGTHPALGDGITNHTACAHWSGNCCFWKTEVLVKACPGGYHVYRLEGTPWCNLRYCTDPSTVEDKCEKACRPEEECLALNSNWGXFCRQGPQ

SEQ ID NO: 478 - protein, 97 aa, Homo sapiens
  SITE (72): Xaa equals any of the naturally occurring L-amino acids
  SITE (96): Xaa equals any of the naturally occurring L-amino acids
MRDALLAYSPQFTLSPQVIKYGLKTGNVASLCPWWIGPQIVILTTLTAVKVEGIPAWIHHSHVKPAAPETWXARPSPDNPCRVTLKMMTSPVPVTXR

SEQ ID NO: 479 - protein, 158 aa, Homo sapiens
  SITE (66): Xaa equals any of the naturally occurring L-amino acids
CDLSSRQRWDIMASIWVGHRGTVRDYPDFSPSVDAEAIQKAIRGIGTDEKMLISILTERSNAQRQXIVKEYQAAYGKELKDDLKGDLSGHFEHLMVALVTPPAVFDAKQLKKSMKGAGTNEDALIEILTTRTSRQMKDISQAYLYSIQEESWEMDISF

SEQ ID NO: 480 - protein, 105 aa, Homo sapiens
IYCRMLIFWTITLFLLGAAKGKEVCYEDLGCFFDTEPWGGTAIRPLKILPWSPEKIGTRFLLYTNENPNNFQILLLSDPSTIEASNFQMDRKTRFIIHGFHRQRG

SEQ ID NO: 481 - protein, 136 aa, Homo sapiens
  SITE (17): Xaa equals any of the naturally occurring L-amino acids
IRQRFQMDRKTRFIIHXFIDKGDESWVTDMCKKLFEVEEVNCICVDWKKGSQATYTQAANNVRVVGAQVAQMLDILLTEYSYPPSKVHLIGHSLGAHVAGEAGSKTPGLSRITGLDPVEASFESTPEEVRLDPSEC

SEQ ID NO: 482 - protein, 188 aa, Homo sapiens
  SITE (124): Xaa equals any of the naturally occurring L-amino acids
ASQVEGSQGAELLSEIQSPQRNVSFDVLPAFNALGQLSSGSTPSPEVYAGLIDLYKSSDLPGGEFSTCFTVLQRNFIRSRPTKLKDLIRLVKHWYKECERKLKPKGSLPPKYALELLTIYAWEXGSGVPDFDTAEGFRTVLELVTQYQQLCIFWKVNYNFEDETVRKFLLSQLQKTRPVDLGPSRTHR

SEQ ID NO: 483 - protein, 78 aa, Homo sapiens
RRKVAMDLIPNLAVETWLLLAVSLVLLYLYGTRTHGLFKRLGIPGPTPLPLLGNVLSYRQGLWKFDTECYKKYGKMWG

SEQ ID NO: 484 - protein, 211 aa, Homo sapiens
CTSSAPRRSSPCSAGPTWSGTLWRRRRRCWRTGCGSRSRCCGCSRHYRTGSAVPRELLEKLIESRQANTGLFNLRQIVLAKVDQALHTQTDADPAEEYARLCQEILGVPATPGTNMPATFGHLAGGYDAQYYGYLWSEVYSMDMFHTRFKQEGVLNSKVGMDYRSCILRPGGSEDASAMLRRFLGRDPKQDAFLLSKGLQVGGCEPEPQSG

SEQ ID NO: 485 - protein, 371 aa, Homo sapiens
  SITE (122): Xaa equals any of the naturally occurring L-amino acids
GSEKPGGAGWKEDEPTKQRSEDSMYTAIPQSGSPFPGSVQDPGLHVWRVEKLKPVPVAQENQGVFFSGDSYLVLHNGPEEVSHLHLWIGQQSSRDEQGACAVLAVHLNTLLGERPVQHREVXGNESDLFMSYFPRGLKYQEGGVESAFHKTSTGAPAAIKKLYQVKGKKNIRATERALNWDSFNTGDCFILDLGQNIFAWCGGKSNILERNKARDLALAIRDSERQGKAQVEIVTDGEEPAEMIQVLGPKPALKEGNPEEDLTADKANAQAAALYKVSDATGQMNLTKVADSSPFALELLISDDCFVLDNGLCGKIYIWKGRKANEKERQAALQVAEGFISRMQYAPNTQVEILPQGRESPIFKQFFKDWK

SEQ ID NO: 486 - protein, 61 aa, Homo sapiens
  SITE (23): Xaa equals any of the naturally occurring L-amino acids
  SITE (53): Xaa equals any of the naturally occurring L-amino acids
  SITE (54): Xaa equals any of the naturally occurring L-amino acids
  SITE (61): Xaa equals any of the naturally occurring L-amino acids
KQHFYCLLPANLYLKPLDTDSLXWDFGIDGFLPFFSASASIAFIKLHCVQKKXXKKKKGGX

SEQ ID NO: 487 - protein, 198 aa, Homo sapiens
  SITE (151): Xaa equals any of the naturally occurring L-amino acids
  SITE (180): Xaa equals any of the naturally occurring L-amino acids
  SITE (195): Xaa equals any of the naturally occurring L-amino acids
  SITE (198): Xaa equals any of the naturally occurring L-amino acids
RGGLLGARPPAQRTLCCPARCGCCWRSWPSPRRAIGSAESHWCYEVQAESSNYPCLVPVKWGGNCQKDRQSPINIVTTKAKVDKKLGRFFFSGYDKKQTWTVQNNGHSVMMLLENKASISGGGLPAPYQAKQLHLHWSDLPYKGSEHSLDXEAFAMGDAHSYMRKRRGHPRNVKEAQDPXRRICGAGLFLGGGWXPGX

SEQ ID NO: 488 - protein, 116 aa, Homo sapiens
  SITE (5): Xaa equals any of the naturally occurring L-amino acids
  SITE (21): Xaa equals any of the naturally occurring L-amino acids
  SITE (66): Xaa equals any of the naturally occurring L-amino acids
  SITE (69): Xaa equals any of the naturally occurring L-amino acids
KEGLXSLHLLCSTAHYQKTAXMKSIYFVAGLFVMLVQGSWQRSLQDTEEKSRSFSASQADPLSDPXQMXEDKRHSQGTFTSDYSKYLDSRRAQDFVQWLMNTKRNRNNIAKRHGEF

SEQ ID NO: 489 - protein, 389 aa, Homo sapiens
  SITE (376): Xaa equals any of the naturally occurring L-amino acids
  SITE (377): Xaa equals any of the naturally occurring L-amino acids
  SITE (379): Xaa equals any of the naturally occurring L-amino acids
VWSFSLDTEPSRQAKQARTHHPAPGPASLLPSNAMGSNLSPQLCLMPFILGLLSGGVTTTPWSLARPQGSCSLEGVEIKGGSFRLLQEGQALEYVCPSGFYPYPVQTRTCRSTGSWSTLKTQDQKTVRKAECRAIHCPRPHDFENGEYWPRSPYYNVSDEISFHCYDGYTLRGSANRTCQVNGRWSGQTAICDNGAGYCSNPGIPIGTRKVGSQYRLEDSVTYHCSRGLTLRGSQRRTCQEGGSWSGTEPSCQDSFMYDTPQEVAEAFLSSLTETIEGVDAEDGHGPGEQQKRKIVLDPSGSMNIYLVLDGSDSIGASNFTGAKKCLVNLIEKVASYGVKPRYGLVTYATYPKIWVKVSEADSSNAGLGHGSSFNXXQXLKTTSLKSGA

SEQ ID NO: 490 - protein, 187 aa, Homo sapiens
ALLEGLDYYTGVIYEAVLLQTPAQAGEEPLGVGSVAAGGRYDGLVGMFDPKGRKVPCVGLSIGVERIFSIVEQRLEALEEKIRTTETQVLVASAQKKLLEERLKLVSELWDAGIKAELLYKKNPKLLNQLQYCEEAGIPLVAIIGEQELKDGVIKLRSVTSREEVDVRREDLVEEIKRRTGQPLCIC

SEQ ID NO: 491 - protein, 271 aa, Homo sapiens
QYKRHCINCLHVVTLYNRIKRDPAKAFVPRTVMIGGKAAPGYHMAKLIIKLVTSIGDVVNHDPVVGDRLKVIFLENYRVSLAEKVIPAADLSQQISTAGTEASGTGNMKFMLNGALTIGTMDGANVEMAEEAGAENLFIFGLRVEDVEALDRKGYNAREYYDHLPELKQAVDQISSGFFSPKEPDCFKDIVNMLMHHDRFKVFADYEAYMQCQAQVDQLYRNPKEWTKKVIRNIACSGKFSSDRTITEYAREIWGVEPSDLQIPPPNIPRD

SEQ ID NO: 492 - protein, 147 aa, Homo sapiens
  SITE (100): Xaa equals any of the naturally occurring L-amino acids
  SITE (128): Xaa equals any of the naturally occurring L-amino acids
  SITE (130): Xaa equals any of the naturally occurring L-amino acids
  SITE (132): Xaa equals any of the naturally occurring L-amino acids
  SITE (133): Xaa equals any of the naturally occurring L-amino acids
  SITE (139): Xaa equals any of the naturally occurring L-amino acids
  SITE (143): Xaa equals any of the naturally occurring L-amino acids
STHASERQSHQLPLVGLLLFSFIPSQLCEICEVSEENYIRLKPLLNTMIQSNYNRGTSAVNVVLSLKLVGIQIQTLMQKMIQQIKYNVKSRLSDVSSGEXALIILALGVCRNAEENLIYDYHLIDKLXNXIXXQKLENXGGTXWALP

SEQ ID NO: 493 - protein, 161 aa, Homo sapiens
  SITE (152): Xaa equals any of the naturally occurring L-amino acids
LDFNLTDPENGPVLDDSLPNSVHEYIPFAKDCGNKEKCISDLSLHVATTEKDLLIVRSQNDKFNVSLTVKNTKDSAYNTRTIVHYSPNLVFSGIEAIQKDSCESNHNITCKVGYPFLRRGEMVTFKILFQFNTSYLMGKCDHLFKCTSGQRXNLLKPFLIM

SEQ ID NO: 494 - protein, 139 aa, Homo sapiens
VETGWVELPEVLAPSSRRAFPILHGALHLDQQSPGVEASDWRGWRGAHHLCCGPGIMSKLWLGFDLRAAIAAPILHVNSKGCVEYEPNFSQEVQRGLQDRGQNQTQRPFFLNVVQAVSQEGACVYAVSDLRKSGEAAGY

SEQ ID NO: 495 - protein, 215 aa, Homo sapiens
  SITE (139): Xaa equals any of the naturally occurring L-amino acids
ASHSRGSSSSSHSSSVRRGSSYSSSMSTGGGGAGSLGAGGAFGEAAGDRGPYGTDIGPGGGYGAAAEGGMYAGNGGLLGADFAGDLDYNELAVRVSESMQRQGLLQGMAYTVQGPPGQPGPQGPPGISKVFSAYSNVTXDLMDFFQTYGAIQGPPGQKGEMGTPGPKGDRGPAGPPGHPGPPGPSRTQGRKRRQRLTKSMLGGEGEEVIGCQPLS

SEQ ID NO: 496 - protein, 309 aa, Homo sapiens
  SITE (247): Xaa equals any of the naturally occurring L-amino acids
PPGIPGQPGLKGLPGPQGPQGLPGPTGPPGDPGRNGLPGFDGAGGRKGDPGLPGQPGTRGLDGPPGPDGLQGPPGPPGTSSVAHGFLITRHSQTTDAPQCPQGTLQVYEGFSLLYVQGNKRAHGQDLGTAGSCLRRFSTMPFMFCNINNVCNFASRNDYSYWLSTPEPMPMSMQPLKGQSIQPFISRCAVCEAPAVVIAVHSQTIQIPHCPQGWDSLWIGYSFMMHTSAGAEGSGQALASPGSCLEXFRSAPFIECHGRGTCNYYANSYSFWLATVDVSDMFSKPQSETLKAGDLRTRISRCQVCMKRT

SEQ ID NO: 497 - protein, 40 aa, Homo sapiens
  SITE (38): Xaa equals any of the naturally occurring L-amino acids
  SITE (40): Xaa equals any of the naturally occurring L-amino acids
TLCYCSSQMLFYICKKLTSHQMLSSTEILKWLRGNIDXQX

SEQ ID NO: 498 - protein, 88 aa, Homo sapiens
  SITE (6): Xaa equals any of the naturally occurring L-amino acids
CPRSLXYFRMYAKEFDLLKYIRFKTTVCSVKKQPDFATSGQWEVVTESEGKKEMNVFDGVMVCTGHHTNAHLPLESFPGEQLTRKEDP

SEQ ID NO: 499 - protein, 253 aa, Homo sapiens [sequence omitted]

SEQ ID NO: 500 - protein, 169 aa, Homo sapiens
RTRGRTRGLEFGLQPHKIPDTETLCYVMPSSSARCAQFPRAQDKVHYYIKLKDLRDQLKGIERNMDVQEVQYTFDLQLAQEDAKKMAVKEEKYDPGYEAAYGGAYGENPCSSEPCGFSSNGLIESVELRGESAFSGIPNGQWMTQSFTDQIPSFSNHCGTQEQEEESHA

SEQ ID NO: 501 - protein, 119 aa, Homo sapiens
  SITE (3): Xaa equals any of the naturally occurring L-amino acids
  SITE (16): Xaa equals any of the naturally occurring L-amino acids
  SITE (54): Xaa equals any of the naturally occurring L-amino acids
  SITE (55): Xaa equals any of the naturally occurring L-amino acids
  SITE (83): Xaa equals any of the naturally occurring L-amino acids
  SITE (88): Xaa equals any of the naturally occurring L-amino acids
  SITE (97): Xaa equals any of the naturally occurring L-amino acids
  SITE (99): Xaa equals any of the naturally occurring L-amino acids
  SITE (101): Xaa equals any of the naturally occurring L-amino acids
  SITE (117): Xaa equals any of the naturally occurring L-amino acids
GHXARQGHLSSPTDGXRQGHSQFWEVISDEHAIDSAGTYHGDSHLQLERINVYXXEASGGRYVPRAVLVDLEPGTMDSVRSGXFGQVXRPDNFIFGXLXAXTGVRLLSQGSSKSRNXPR

SEQ ID NO: 502 - protein, 112 aa, Homo sapiens
  SITE (30): Xaa equals any of the naturally occurring L-amino acids
  SITE (43): Xaa equals any of the naturally occurring L-amino acids
  SITE (54): Xaa equals any of the naturally occurring L-amino acids
  SITE (103): Xaa equals any of the naturally occurring L-amino acids
  SITE (109): Xaa equals any of the naturally occurring L-amino acids
  SITE (110): Xaa equals any of the naturally occurring L-amino acids
THLWKRNPCDCGTKKSASYQTIRFCHEKWXKCRLSGEGFYPKXIRINLVSSKKXTEFDPAIVISPSGKYNAVNLGKYEDSNSVTCSVQHDNKTVHSTDFGSEXRFYRSXXTK

SEQ ID NO: 503 - protein, 156 aa, Homo sapiens
  SITE (32): Xaa equals any of the naturally occurring L-amino acids
  SITE (137): Xaa equals any of the naturally occurring L-amino acids
DSSHRSRRHHRASASAAAAAAPGPRPFAALVXPALLRRRLPPRPAMPLYSVTVKWGKEKFEGVELNTDEPPMVFKAQLFALTGVQPARQKVMVKGGTLKDDDWGNIKIKNGMTLLMMGSADALPEEPSAKTVFVEDXDRRTVSICYGVTMWIDKPW

SEQ ID NO: 504 - protein, 155 aa, Homo sapiens
  SITE (8): Xaa equals any of the naturally occurring L-amino acids
  SITE (104): Xaa equals any of the naturally occurring L-amino acids
  SITE (117): Xaa equals any of the naturally occurring L-amino acids
  SITE (154): Xaa equals any of the naturally occurring L-amino acids
VFKEQELXPEDKGAVPEDASTERSAMASLGLQLVGYILGLLGLLGTLVAMLLPSWKTSSYVGASIVTAVGFSKGLWMECATHSTGITQCDIYSTLLGLPADIQXAQAMMVTSSAISXLACIISVVGMRCTVFCQESRAKDRVAVAGGVFFILGXL

SEQ ID NO: 505 - protein, 120 aa, Homo sapiens
  SITE (76): Xaa equals any of the naturally occurring L-amino acids
SDHPPPPALHQATGLGFLLITICCYHGTQQGIPGPPAKWLPKSPLLTQKSGMALKRCKFLYCYPPHHQDHVGCSLXSLTRFPKKVLPPFQTDERGQDFRLDPPLGSPSPSLEHGRGGDGW

SEQ ID NO: 506 - protein, 102 aa, Homo sapiens
  SITE (45): Xaa equals any of the naturally occurring L-amino acids
  SITE (80): Xaa equals any of the naturally occurring L-amino acids
  SITE (92): Xaa equals any of the naturally occurring L-amino acids
PFQPPLLDLRRPSQQSQWPQHLAGQLPSLLICQTRTQTKPMRNGXTASESSDFTSERRGDKEAPPPVLLTPKAVGTPGGXGGGALPGISAMXRGDLSQRAKI

SEQ ID NO: 507 - protein, 103 aa, Homo sapiens
  SITE (68): Xaa equals any of the naturally occurring L-amino acids
CQQLIYEPTIVPHCTKVSHKRNRIFWSTDCSRVAPLCAAGVVVFIFMVRFNINYLSCHAFFFLQFSRXSTEQFLISYLEYESRFYFVMLIIPKDALNAWKNAF

SEQ ID NO: 508 - protein, 51 aa, Homo sapiens
  SITE (32): Xaa equals any of the naturally occurring L-amino acids
  SITE (36): Xaa equals any of the naturally occurring L-amino acids
EPPLIVSSFSGQEAQTELPQARISCPEGTNAXRSYXYYFNGRPWRPGLMQM

SEQ ID NO: 509 - protein, 73 aa, Homo sapiens
IFLYFTWASLYTAIYTIISYSYMFFVPFVVLFVLLDSYLDGNALSGFGCFSCFSICIKKLVHVNTFHVFSSNV

SEQ ID NO: 510 - protein, 218 aa, Homo sapiens
ETRVPARPGQARAMEFLWAPLLGLCCSLAAADRHTVFWNSSNPKFRNEDYTIHVQLNDYVDIICPHYEDHSVADAAMEQYILYLVEHEEYQLCQPQSKDQVRWQCNRPSAKHGPEKLSEKFQRFTPFTLGKEFKEGHSYYYISKPIHQHEDRCLRLKVTVSGKITHSPQAHDNPQEKRLAADDPEVRVLHSIGHSAAPRLFPLAWTVLLLPLLLLQTP

SEQ ID NO: 511 - protein, 156 aa, Homo sapiens
  SITE (156): Xaa equals any of the naturally occurring L-amino acids
FFSHLDCKMKLLVLAVLLTVAAADSGISPRAVWQFRKMIKCVIPGSDPFLEYNNYGCYCGLGGSGTPVDELDKCCQTHDNCYDQAKKLDSCKFLLDNPYTHTYSYSCSGSAITCSSKNKECEAFICNCDRNAAICFSKAPYNKAHKNLDTKKYCQX

SEQ ID NO: 512 - protein, 169 aa, Homo sapiens
  SITE (143): Xaa equals any of the naturally occurring L-amino acids
  SITE (144): Xaa equals any of the naturally occurring L-amino acids
ESRPADRRVLPPIHVKMTKFGFLRLSYEKQDTLLKLLILSMAAVLSFSTRLFAVLRFESVIHEFDPYFNYRTTRFLAEEGFYKFHNWFDDRAWYPLGRIIGGTIYPGLMITSAAIYHVLHFFHITIDIRNVCVFLAPLFSSFXXIVTYHLTKELKDAGAGLLAAAMIAV

SEQ ID NO: 513 - protein, 330 aa, Homo sapiens
  SITE (10): Xaa equals any of the naturally occurring L-amino acids
SLCSRLFELXVYQQGDLDKALLLTKKLLELDPEHQRANGNLKYFEYIMAKEKDVNKSASDDQSDQKTTPKKKGVAVDYLPERQKYEMLCRGEGIKMTPRRQKKLFCRYHDGNRNPKFILAPAKQEDEWDKPRIIRFHDIISDAEIEIVKDLAKPRLRRATISNPITGDLETVHYRISKSAWLSGYENPVVSRINMRIQDLTGLDVSTAEELQVANYGVGGQYEPHFDFARKDEPDAFKELGTGNRIATWLFYMSDVSAGGATVFPEVGASVWPKKGTAVFWYNLFASGEGDYSTRHAACPVLVGNKWVSNKWLHERGQEFRRPCTLSELE

SEQ ID NO: 514 - protein, 60 aa, Homo sapiens
  SITE (1): Xaa equals any of the naturally occurring L-amino acids
  SITE (6): Xaa equals any of the naturally occurring L-amino acids
  SITE (7): Xaa equals any of the naturally occurring L-amino acids
  SITE (8): Xaa equals any of the naturally occurring L-amino acids
XYLVLXXXSGIFSSHFHWHKSLLYVIQFKLLNQKFYGPVSLAKRCWRECNIQLICGYIYI

SEQ ID NO: 515 - protein, 311 aa, Homo sapiens
  SITE (155): Xaa equals any of the naturally occurring L-amino acids
AEDVDHDGGLGGLQHHPTPHPRPRPGDYSQVLFERPGIWKDLKTMGSVSLSIFFITLLVLGRQNEYYCRLDFLWKNKFKKEREEIETMENLNRVLLENVLPAHVAEHFLARSLKNEELYHQSYDCVCVMFASIPDFKEFYTESDVNKEGLECLRXLNEIIADFDDLLSKPKFSGVEKIKTIGSTYMAATGLSAVPSQEHSQEPERQYMHIGTMVEFAFALVGKLDAINKHSFNDFKLRVGINHGPVIAGVIGAQKPQYDIWGNTVNVASRMDSTGVLDKIQVTEETSLVLQTLGYTCTCRGIIQRERERGT

SEQ ID NO: 516 - protein, 85 aa, Homo sapiens
  SITE (84): Xaa equals any of the naturally occurring L-amino acids
SGLLVLSVLLGAVFGKEDFVGHQVLRISVADEAQVQKVKELEDLEHLQLDFWRGPAHPGSPIDVRVPFPSIQAVKIFLEFHGIXY

SEQ ID NO: 517 - protein, 406 aa, Homo sapiens
GHEGSMRGLLVLSVLLGAVFGKEDFVGHQVLRISVADEAQVQKVKELEDLEHLQLDFWRGPAHPGSPIDVRVPFPSIQAVKIFLESHGISYETMIEDVQSLLDEEQEQMFAFRSRARSTDTFNYATYHTLEEIYDFLDLLVAENPHLVSKIQIGNTYEGRPIYVLKFSTGGSKRPAIWIDTGIHSREWVTQASGVWFAKKITQDYGQDAAFTAILDTLDIFLEIVTNPDGFAFTHSTNRMWRKTRSHTAGSLCIGVDPNRNWDAGFGLSGASSNPCSETYHGKFANSEVEVKSIVDFVKDHGNIKAFISIHSYSQLLMYPYGYKTEPVPDQDELDQLSKAAVTALASLYGTKFNYGSIIKAIYQASGSTIDWTYSQGIKYSFTFELRDTGRYGFLLPASQIIPTAN

SEQ ID NO: 518 - protein, 217 aa, Homo sapiens
RAAVQSRHLVGAKPTPGSEQQPLRCPWPVSFHLSTSMGNIFANLFKGLFGKKEMRILMVGLDAAGKTTILYKLKLGEIVTTIPTIGFNVETVEYKNISFTVWDVGGQDKIRPLWRHYFQNTQGLIFVVDSNDRERVNEAREELMRMLAEDELRDAVLLVFANKQDLPNAMNAAEITDKLGLHSLRHRNWYIQATCATSGDGLYEGLDWLSNQLRNQK

SEQ ID NO: 519 - protein, 112 aa, Homo sapiens
  SITE (86): Xaa equals any of the naturally occurring L-amino acids
  SITE (96): Xaa equals any of the naturally occurring L-amino acids
  SITE (111): Xaa equals any of the naturally occurring L-amino acids
LLFLKRCSVKLALRVREACDLKTENWEETLYPVLLAGFDRSRSAWDFLKLCPKLQLWEWRNKQASPRIVKEIALVDETKTNALDFXALPGVVTRGXNVCGHILNSKVFSSXG

SEQ ID NO: 520 - protein, 71 aa, Homo sapiens
KARVQIRLVSLVGDYFWVHSVVQETLVKHLLLLDTMLDTEDNEGKIDIVPALMELIVSCGLSEQSLNLLLY

SEQ ID NO: 521 - protein, 183 aa, Homo sapiens
AAVNHLQSAGSTSPILAAAQSLHREATKWSSKGNDIIAAAKRMALLMAEMSRLVRGGSGTKRALIQCAKDIAKASDEVTRLAKEVAKQCTDKRIRTNLLQVCERIPTISTQLKILSTVKATMLGRTNISDEESEQATEMLVHNAQNLMQSVKETVREAEAASIKIRTDAGFTLRWVRKTPWYQ

SEQ ID NO: 522 - protein, 80 aa, Homo sapiens
NHLTIKWTTENSPSCLKASPTVVILQAATCNLDVVSTCSAGYDSCILGLAFFCVINYGYPLNRHLMKHCTNCHSFDDTWE

SEQ ID NO: 523 - protein, 41 aa, Homo sapiens
PNQWLCSTQCPSGETEGQRGEGTCPRSHGDGTPRAGPLVRA

SEQ ID NO: 524 - protein, 374 aa, Homo sapiens
  SITE (76): Xaa equals any of the naturally occurring L-amino acids
  SITE (77): Xaa equals any of the naturally occurring L-amino acids
  SITE (78): Xaa equals any of the naturally occurring L-amino acids
EGQSSALAGQGAAQRAGDPGAARARPRLRSGSQRQPGAHGPSAHGSTMPALLERPKLSNAMARALHRHIMMERERXXXEEEEVDKMMEQKMKEEQERRKKKEMEERMSLEETKEQILKLEEKLLALQEEKHQLFLQLKKVLHEEEKRRRKEQSDLTTLTSAAYQQSLTVHTGTHLLSMQGSPGGHNRPGTLMAADRAKQMFGPQVLTTRHYVGSAAAFAGTPEHGQFQGSPGGAYGTAQPPPHYGPTQPAYSPSQQLRAPSAFPAVQYLSQPQPQPYAVHGHFQPTQTGFLQPGGALSLQKQMEHANQQTGFSDSSSLRPMHPQALHPAPGLLASPQLPVQMQPAGKSGFAATSQPGPRLPFIQHSQNPRFYHK

SEQ ID NO: 525 - protein, 100 aa, Homo sapiens
GSHCYYFNEEHETWVYADLYCQNMNSGNLVSVLTQAEGAFVASLIKESGTKDSNVWIGLHDPHRISLLHLLPPDYQVPEGLMSGTSSISFYYIMIKATSL

SEQ ID NO: 526 - protein, 104 aa, Homo sapiens
RLHTMDSFSQDVKTRLLIMIRLLPPFNLSLLMPASFAWQDDAVISISQEVASEGNLTEYQIYLVNPNVLHKIRDPLVHPVTDISSIFNTAVCSNVQWSFSELDF

SEQ ID NO: 527 - protein, 123 aa, Homo sapiens
  SITE (48): Xaa equals any of the naturally occurring L-amino acids
  SITE (64): Xaa equals any of the naturally occurring L-amino acids
  SITE (81): Xaa equals any of the naturally occurring L-amino acids
  SITE (99): Xaa equals any of the naturally occurring L-amino acids
  SITE (106): Xaa equals any of the naturally occurring L-amino acids
  SITE (108): Xaa equals any of the naturally occurring L-amino acids
FPSISRAVDDEIEANLEEFDISEDDIDDGFRRLFAQLAGEDAEISAFXLQTILRRVLAKRQDIXSDGFSIETCKIMVDMLXSDGSGKLGLKEFYILWTXIQKYQVXSXKCGWICVGKHSVHML

SEQ ID NO: 528 - protein, 428 aa, Homo sapiens
  SITE (7): Xaa equals any of the naturally occurring L-amino acids
  SITE (117): Xaa equals any of the naturally occurring L-amino acids
  SITE (124): Xaa equals any of the naturally occurring L-amino acids
  SITE (258): Xaa equals any of the naturally occurring L-amino acids
GRMGTPXKPMAMRLILFFGALFGHIYCLETFVGDQVLEIVPSNEEQIKNLLQLEAQEHLQLDFWKSPTTPGETAHVRVPFVNVQAVKVFLESQGIAYSIMIEDVQVLLDKENEEMLXNRRRERXVNFNFGAYHTLEEISQEMDNLVAEHPGLVSKVNIGSSFENRPMNVLKFSTGGDKPAIWLDAGIHAREWVTQATALWTANKIVSDYGKDPSITSILDALDIFLLPVTNPDGYVFSQTKNRMWRKTRSKVSGSLCXGVDPNRNWDAGFGGPGASSNPCSDSYHGPSANSEVEVKSIVDFIKSHGKVKAFITLHSYSQLLMFPYGYKCTKLDDFDELSEVAQKAAQSLRSLHGTKYKVGPICSVIYQASGGSIDWSYDYGIKYSFAFELRDTGRYGFLLPARQILPTAEETWLGLKAIMEHVRDHPY

SEQ ID NO: 529 - protein, 192 aa, Homo sapiens
SLTLSLVLLGSSWGCGIPAIKPALSFSQRIVNGENAVLGSWPWQVSLQDSSGFHFCGGSLISQSWVVTAAHCNVSPGRHFVVLGEYDRSSNAEPLQVLSVSRAITHPSWNSTTMNNDVTLLKLASPAQYTTRISPVCLASSNEALTEGLTCVTTGWGRLSGVGNVTPAHLQQVALPLVTVNQCRQYWGSSYH

SEQ ID NO: 530 - protein, 321 aa, Homo sapiens
GQSTASPAFSAAPQPRALSFPALPCLAFQCSSFCEMTLKASEGESGGSMHTALSDLYLEHLLQKRSRPEAVSHPLNTVTEDMYTNGSPAPGSPAQVKGQEVRKVRLIQFEKVTEEPMGITLKLNEKQSCTVARILHGGMIHRQGSLHVGDEILEINGTNVTNHSVDQLQKAMKETKGMISLKVIPNQQSRLPALQMFMRAQFDYDPKKDNLIPCKEAGLKFATGDIIQIINKDDSNWWQGRVEGSSKESAGLIPSPELQEWRVASMAQSAPSEARAAVPLGRRRSTKTNIWPSTARFLISWMLFPTRKSFGSLHSRGRPWC

SEQ ID NO: 531 - protein, 390 aa, Homo sapiens
  SITE (3): Xaa equals any of the naturally occurring L-amino acids
  SITE (84): Xaa equals any of the naturally occurring L-amino acids
QRXSGTFTMGRKSLYLLIVGILIAYYIYTPLPDNVEEPWRMMWINAHLKTIQNLVVGSFDEVPPTSDENVTVTETKFNNILVRXYVPKRKSEALRRGLFYIHGGGWCVGSAALSGYDLLSRWTADRLDAVVVSTNYRLAPKYHFPIQFEDVYNALRWFLRKKVLAKYGVNPERIGISGDSAGGNLAAAVTQQLLDDPDVKIKLKIQSLIYPALQPLDVDLPSYQENSNFLFLSKSLMVRFWSEYFTTDRSLEKAMLSRQHVPVESSHLFKFINWSSLLPERFIKGHVYNNPNYGSSELAKKYPGFLDVRAAPLLADDNKLRGLPLTYVITCQYDLLRDDGLMYVTRLRNTGVQVTHNHVEDGFHGAFSFLGLKISHRLINQYIEWLKENL

SEQ ID NO: 532 - protein, 261 aa, Homo sapiens
  SITE (8): Xaa equals any of the naturally occurring L-amino acids
  SITE (242): Xaa equals any of the naturally occurring L-amino acids
  SITE (245): Xaa equals any of the naturally occurring L-amino acids
  SITE (256): Xaa equals any of the naturally occurring L-amino acids
  SITE (260): Xaa equals any of the naturally occurring L-amino acids
GVGYNTVXSPPAPSFCNMGKNKLLHPSLVLLLLVLLPTDASVSGKPQYMVLVPSLLHTETTEKGCVLLSYLNETVTVSASLESVRGNRSLFTDLEAENDVLHCVAFAVPKSSSNEEVMFLTVQVKGPTQEFKKRTTVMVKNEDSLVFVQTDKSIYKPGQTVKFRVVSMDENFHPLNELIPLVYIQDPKGNRIAQWQSFQLEGGLKQFSFPLSSEPFQGSLQGGGTEEIRWEGTEHPFHRGRXCCXPKFGSYKLTVXKGNXH

SEQ ID NO: 533 - protein, 73 aa, Homo sapiens
  SITE (24): Xaa equals any of the naturally occurring L-amino acids
  SITE (32): Xaa equals any of the naturally occurring L-amino acids
NRSVQSYFFLTLNFPSREYTIWLXGRGSPEEXGFALRGRASLDFAASNFSRGVEGGALGGPHSLSGVPARVSF

SEQ ID NO: 534 - protein, 150 aa, Homo sapiens
  SITE (1): Xaa equals any of the naturally occurring L-amino acids
XRKQQRRLYPVSPPPSLLRLPSRAPYTPQSRSRHVPETRRREPCGGDRRGEAGHAEKEGILPERAEEAKLKAKYPSLGQKPGGSDFLMKRLQKGQKYFDSGDYNMAKAKMKNKQLPSAGPDKNLVTGDHIPTPQDLPQRKSSLVTSKLAG

SEQ ID NO: 535 - protein, 67 aa, Homo sapiens
QIVKIEAIAQHRFSINAVNLPYLRKNSLTLEYCIELSYTHKTFSLVNQDPVRVSLELFWNNARIQTD

SEQ ID NO: 536 - protein, 107 aa, Homo sapiens
  SITE (57): Xaa equals any of the naturally occurring L-amino acids
  SITE (80): Xaa equals any of the naturally occurring L-amino acids
  SITE (85): Xaa equals any of the naturally occurring L-amino acids
  SITE (103): Xaa equals any of the naturally occurring L-amino acids
HASGRPPRCWRPAWRGCSSTRRCSTPCSAGRCRVGRTGTGTTASTPPCCWARCRCGXDAPLVQDENVRGVITMNEEYETXFLCNXSQVHKWNPEEAVRPSPRXGHTS

SEQ ID NO: 537 - protein, 49 aa, Homo sapiens
  SITE (39): Xaa equals any of the naturally occurring L-amino acids
NQINFCLNGKYTYICIDTLPLYMFNIHTLKHINTSVIIXWSLQYSIKDK

SEQ ID NO: 538 - protein, 149 aa, Homo sapiens
  SITE (62): Xaa equals any of the naturally occurring L-amino acids
  SITE (122): Xaa equals any of the naturally occurring L-amino acids
  SITE (145): Xaa equals any of the naturally occurring L-amino acids
AQARVPATTASPGGPAIFPPQTSPQGPEWKRPSDPPFQPSPPSQKLTGPAPTSSTAGHPPPXAPLPTPRGTRRTACPPSALPAAPTPPSLSAPCTQSPACLCAPHSHCPRRRRSRSHWCLRXALGEAVLSALLQRLQRPRDHHVXAHVL

SEQ ID NO: 539 - protein, 61 aa, Homo sapiens
EMYVLLLLIKGIVEYKRFFKLVLSLIGFYNPHFKEEMHLTFNNLVKKYNVALPCITFNYCK

SEQ ID NO: 540 - protein, 148 aa, Homo sapiens
  SITE (112): Xaa equals any of the naturally occurring L-amino acids
GGGAGLQGLPGARGGLGPGSRAASSLLGRAATGEVLGAGGSPRAGVTPTFTAPKNTSRVGGGGHRATSRSGFCPSSLFTRRNFRPDVFSQNRNTSQGQTDRKRGCLAVAPHXPTGFRAPELAAAPSLEQSFMQRGCFLKLSVHGDFFF

SEQ ID NO: 541 - protein, 30 aa, Homo sapiens
  SITE (12): Xaa equals any of the naturally occurring L-amino acids
FYFTSILQVELXGRVVSNPKLVIPVPRGHH

SEQ ID NO: 542 - protein, 241 aa, Homo sapiens
ELLALDQLHGSRRQLQWLVGELQAAEDRGDKVHIIGHIPPGHCLKSWSWNYYRIVARYENTLAAQFFGHTHVDEFEVFYDEETLSRPLAVAFLAPSATTYIGLNPGYRVYQIDGNYSGSSHVVLDHETYILNLTQANIPGAIPHWQLLYRARETYGLPNTLPTAWHNLVYRMRGDMQLFQTFWFLYHKGHPPSEPCGTPCRLATLCAQLSARADSPALCRHLMPDGSLPEAQSLWPRPLFC

SEQ ID NO: 543 - protein, 89 aa, Homo sapiens
RNRKNTDGHQQFFAIVQLIGTRKQAENFAYRLELNGHRRRLTWEATPRSIHEGIATAIMNSDCLVFDTSIAQLFAENGNLGINVTISMC

SEQ ID NO: 544 - protein, 74 aa, Homo sapiens
  SITE (41): Xaa equals any of the naturally occurring L-amino acids
  SITE (65): Xaa equals any of the naturally occurring L-amino acids
GIQAAPGRGRLRLYPGPRSPRDRQMRAAGPGHMSSATDATXPALDMPDRVSTRPWDWSPDSACPXLCFTPLVAK

SEQ ID NO: 545 - protein, 271 aa, Homo sapiens
RSSQKKSLMSGYRNFATTECIVRMKLPCFHMKLTTFSQGPPSQTLHLGCLTPFQVGSVQLYQSRIYFKLGSNVSFSCGGETRVPLWLQSFRGHGKMLQRPGALSCLPGRNEPAPAKHGTSCIGHTRAPAINAIQVPKPFSGPVRLHSSNPNLSTLDFGEEKNYSDGSETSSEFSKMQEDLCHIAHKVYFTLRSAFNIMSAEREKLKQLMEQDASSSPSAQVIGLKNALSSALAQNTDLKERLRRIHAESLLLDSPAVAKSGDNLGRGKLQR

SEQ ID NO: 546 - protein, 301 aa, Homo sapiens
  SITE (215): Xaa equals any of the naturally occurring L-amino acids
  SITE (292): Xaa equals any of the naturally occurring L-amino acids
DPRVRENARLFHPKLIIAGTSCYSRNLEYARLRKIADENGAYLMADMAHISGLVAAGVVPSPFEHCHVVTTTTHKTLRGCRAGMIFYRKGVKSVDPKTGKEILYNLESLINSAVFPGLQGGPHNHAIAGVAVALKQAMTLEFKVYQHQVVANCRALSEALTELGYKIVTGGSDNHLILVDLRSKGTDGGRAEKVLEACSIACNKNTCPGDRSALXPSGLRLGTPALTSRGLLEKDFQKVAHFIHRGIELTLQIQSDTGVRATLKEFKERLAGDKYQAAVQALREEVESFASXFPLPGLPDF

SEQ ID NO: 547 - protein, 61 aa, Homo sapiens
  SITE (42): Xaa equals any of the naturally occurring L-amino acids
  SITE (47): Xaa equals any of the naturally occurring L-amino acids
  SITE (48): Xaa equals any of the naturally occurring L-amino acids
  SITE (55): Xaa equals any of the naturally occurring L-amino acids
ETSRTSGSCSWRAGAPAPLLPTHHILPILLQGPRLLSNSWDXRPWRXXPLLGSAXRPPTLL

SEQ ID NO: 548 - protein, 92 aa, Homo sapiens
  SITE (8): Xaa equals any of the naturally occurring L-amino acids
  SITE (9): Xaa equals any of the naturally occurring L-amino acids
  SITE (18): Xaa equals any of the naturally occurring L-amino acids
AQGFRHEXXLLVGGLLAXDGDCPGVVTMFLSAVFFAKSKSKNILVRMVSEAGTGFCFNTKRNRLREKLTLLHYDPVVKQRVLFVEKKKIRSL

SEQ ID NO: 549 - protein, 393 aa, Homo sapiens
  SITE (195): Xaa equals any of the naturally occurring L-amino acids
  SITE (252): Xaa equals any of the naturally occurring L-amino acids
GRGFKKNLFEMAINLAKSQHLDSDGLAQIFMQYGDHLYSKGNHDGAVQQYIRTIGKLEPSYVIRKFLDAQRIHNLTAYLQTLHRQSLANADHTTLLLNCYTKLKDSSKLEEFIKKKSESEVHFDVETAIKVLRQAGYYSHALYLAENHAHHEWYLKIQLEDIKNYQEALRYIGKLPFEQAESNMKRYGKILMHHXPEQTTQLLKGLCTDYRPSLEGRSDREAPGCRANSEEFIPIFANNPRELKAFLEHMSXVQPDSPQGIYDTLLELRLQNWAHEKDPQVKEKLHAEAISLLKSGRFCDVFDKALVLCQMHDFQDGVLYLYEQGKLFQQIMHYHMQHEQYRQSSACVSAMGSRTPPCGSRPSATSLARRRTARSMWQLSSSISRTRTSCHLF

SEQ ID NO: 550 - protein, 786 aa, Homo sapiens
RSHSVYITSTVLAPNVLCVLLLWLNPQALVGAQGGRMSQWYELQQLDSKFLEQVHQLYDDSFPMEIRQYLAQWLEKQDWEHAANDVSFATIRFHDLLSQLDDQYSRFSLENNFLLQHNIRKSKRNLQDNFQEDPIQMSMIIYSCLKEERKILENAQRFNQAQSGNIQSTVMLDKQKELDSKVRNVKDKVMCIEHEIKSLEDLQDEYDFKCKTLQNREHETNGVAKSDQKQEQLLLKKMYLMLDNKRKEVVHKIIELLNVTELTQNALINDELVEWKRRQQSACIGGPPNACLDQLQNWFTIVAESLQQVRQQLKKLEELEQKYTYEHDPITKNKQVLWDRTFSLFQQLIQSSFVVERQPCMPTHPQRPLVLKTGVQFTVKLRLLVKLQELNYNLKVKVLFDKDVNERNTVKGFRKFNILGTHTKVMNMEESTNGSLAAEFRHLQLKEQKNAGTRTNEGPLIVTEELHSLSFETQLCQPGLVIDLETTSLPVVVISNVSQLPSGWASILWYNMLVAEPRNLSFFLTPPCARWAQLSEVLSWQFSSVTKRGLNVDQLNMLGEKLLGPNASPDGLIPWTRFCKENINDKNFPFWLWIESILELIKKHLLPLWNDGCIMGFISKERERALLKDQQPGTFLLRFSESSREGAITFTWVERSQNGGEPDFHAVEPYTKKELSAVTFPDIIRNYKVMAAENIPENPLKYLYPNIDKDHAFGKYYSRPKEAPEPMELDGPKGTGYIKTELISVSEVHPSRLQTTDNLLPMSPEEFDEVSRIVGSVEFDSMMNTV

SEQ ID NO: 551 - protein, 68 aa, Homo sapiens
  SITE (46): Xaa equals any of the naturally occurring L-amino acids
GTSLRESQRSLWGVRLRGCPRTEPRSASGEPREVGVGPAAGQEPCXLEDPPKRKQTLFFFIQPQIARA

SEQ ID NO: 552 - protein, 511 aa, Homo sapiens
  SITE (44): Xaa equals any of the naturally occurring L-amino acids
  SITE (45): Xaa equals any of the naturally occurring L-amino acids
  SITE (46): Xaa equals any of the naturally occurring L-amino acids
  SITE (412): Xaa equals any of the naturally occurring L-amino acids
  SITE (476): Xaa equals any of the naturally occurring L-amino acids
  SITE (492): Xaa equals any of the naturally occurring L-amino acids
  SITE (504): Xaa equals any of the naturally occurring L-amino acids
DPGVPGPEAGHERAAERGEGVPEQRQLRGELHPEYHLHRGAGAXXXATLVVGGDGRFYMKEAIQLIARIAAANGIGRLVIGQNGILSTPAVSCIIRKIKAIGGIILTASHNPGGPNGDFGIKFNISNGGPAPEAITDKIFQISKTIEEYAVCPDLKVDLGVLGKQQFDLENKFKPFTVEIVDSVEAYATMLRSIFDFSALKELLSGPNRLKIRIDAMHGVVGPYVKKILCEELGAPANSAVNCVPLEDFGGHHPDPNLTYAADLVETMKSGEHDFGAAFDGDGDRNMILGKHGFFVNPSDSVAVIAANIFSIPYFQQTGVRGFARSMPTSGALDRVASATKIALYETPTGWKFFGNLMDASKLSLCGEESFGTGSDHIREKDGLWAVLAWLSILATRKQSVEDILKDHWQKXGRNFFTRYDYEEVEAEGANKMMKDLEALMFDRSFVGKQFSANDKVYTVEKADNFEYSDPVDGSXSRNQGLRLIFTDGSRXRLPTERHWECGXHHSAVHR

SEQ ID NO: 553 - protein, 184 aa, Homo sapiens
  SITE (118): Xaa equals any of the naturally occurring L-amino acids
QPSPHSQSRPSPQKDPQPLLLPRLDPGQRGNKLPTGEQGLDEDVDGVCESHAAPGLECSSGSANCQGAGPSADGISSRLTPAESCMGLVRMNLYTHCVKGLMLSLLAEEPLLGDSAPXEEVYHSSLASLNGLEVHLKETLPRDEAASTSSTYNFTYYDRIQSLLMANLPQWPPRMIAASSRPSA

SEQ ID NO: 554 - protein, 80 aa, Homo sapiens
ARAVGYLTTPTAALASAPTSVLSQSGALVRMQGVPYTAGMKDLLSVFQAYQLPADDYTSLMPVGDPPRTVLQAPKEWVCL

SEQ ID NO: 555 - protein, 141 aa, Homo sapiens
  SITE (136): Xaa equals any of the naturally occurring L-amino acids
GHELETTADVEEITGEGLTASGSGDVMRRRIATPEEVRLPLQHGWRREVRIKKGSHRWQGETWYYGPCGKRMKQFPEVIKYLSRNVVHSVRREHFSFSPRMPVGDFFERKRHARGADPKVKYAFVPEEELVDKLQXPLVGV

SEQ ID NO: 556 - protein, 110 aa, Homo sapiens
  SITE (105): Xaa equals any of the naturally occurring L-amino acids
ESMNIFETIVNNKLFFNVSIILFLNKMDLLVEKVKTVSIKKHFPDFRGDPHRLEDVQRYLVQCFDRKRRNRSKPLFHHFTTAIDTENVRFVFHAVKDTILQENLXDIMLQ

SEQ ID NO: 557 - protein, 99 aa, Homo sapiens
KSNKNILFIIALCFGLCRPPDTHEAPTSQAGKAKSLPSAFLVMLHLAECLQGLDPSALRHSWAKQKERNTSAVTLNELRNSFPLDCRGANCLEQKTAGC

SEQ ID NO: 558 - protein, 51 aa, Homo sapiens
  SITE (2): Xaa equals any of the naturally occurring L-amino acids
FXPLPFFFFLSPSGGIPEEGIVVMGDNSSMHVIAPEDLPVKRDVEVEDSDI

SEQ ID NO: 559 - protein, 160 aa, Homo sapiens
  SITE (138): Xaa equals any of the naturally occurring L-amino acids
  SITE (152): Xaa equals any of the naturally occurring L-amino acids
  SITE (158): Xaa equals any of the naturally occurring L-amino acids
THASGRGCCGRVRLLRRGLHVDCGKLGNKLTSSCGKPSSNRMSLQWTAVATFLYAEVFVVLLLCIPFISPKRWQKIFKSRLVELLVSYGNTFFVVLIVILVLLVIDAVREIRKYDDVTEKVNLQNNPGAMEHFHMKLXPCPEESLTLAGFSXWCPPVXSP

SEQ ID NO: 560 - protein, 81 aa, Homo sapiens
WRSRRRMEELRMLEEENQGGGSDMPWRLVGSGLEGGQAGSGRPWEKWREVSGGLASAAAPWWVPGLATARAGRGEGRGLPN

SEQ ID NO: 561 - protein, 67 aa, Homo sapiens
QLTGCRHGRGFLKISLSITISIFTFENLLWRLRTSKLLTYFLYKVTPMKGDYKIIYIAVYKTDNMDV

SEQ ID NO: 562 - protein, 87 aa, Homo sapiens
RIHEKYEIWFHPVRHFNREDQNVTWQLGNNLTSLAVGLNFLIIDPGIFQPETQLSGRQTNCTTPTISWTLKFCLLQSIVSFKAPVLA

SEQ ID NO: 563 - protein, 123 aa, Homo sapiens
HFLQPSLSQICHIGLPFQPRHLTRAICCRVTRDGSAFEDGLRHPFIVNHPKVGRVSIYDSKRQSGKTKETSVNWCLADGYDLEILDGTRGTVDGPRNELSRVSKKNIFLLFKKLCSFRYRRIY

SEQ ID NO: 564 - protein, 188 aa, Homo sapiens
  SITE (117): Xaa equals any of the naturally occurring L-amino acids
YVMESRDPSTNVILLEDTAAVLGVIIAATCMGLTSITGNPLYDSLGSLGVGTLLGMVSAFLIYTNTEALLGRSIQPEQVQRLTELLENDPSVRAIHDVKATDLGLGKVRFKAEVDFXGRVVTRSYLEKQDFDQMLQEIQEVKTPEELETFMLKHGENIIDTLGAEVDRLEKELKKRNPEVRHVDLEIL

SEQ ID NO: 565 - protein, 71 aa, Homo sapiens [sequence omitted]

SEQ ID NO: 566 - protein, 51 aa, Homo sapiens
  SITE (35): Xaa equals any of the naturally occurring L-amino acids
  SITE (36): Xaa equals any of the naturally occurring L-amino acids
  SITE (48): Xaa equals any of the naturally occurring L-amino acids
SPGLPEFGQSASLPLLPAAVAAPFDDDDKIVGGYXXEEKFCPPTRCPXNSG

SEQ ID NO: 567 - protein, 473 aa, Homo sapiens
IRHDGTATMLPLWTLSLLLGAVAGKEVCYERLGCFSDDSPWSGITERPLHILPWSPKDVNTRFLLYTNENPNNFQEVAADSSSISGSNFKTNRKTRFIIHGFIDKGEENWLANVCKNLFKVESVNCICVDWKGGSRTGYTQASQNIRIVGAEVAYFVEFLQSAFGYSPSNVHVIGHSLGAHAAGEAGRRTNGTIGRITGLDPAEPCFQGTPELVRLDPSDAKFVDVIHTDGAPIVPNLGFGMSQVVGHLDFFPNGGVEMPGCKKNILSQIVDIDGIWEGTRDFAACNHLRSYKYYTDSIVNPDGFAGFPCASYNVFTANKCFPCPSGGCPQMGHYADRYPGKTNDVGQKFYLDTGDASNFARWRYKVSVTLSGKKVTGHILVSLFGNKGNSKQYEIFKGTLKPDSTHSNEFDSDVDVGDLQMVKFIWYNNVINPTLPRVGASKIIVETNVGKQFNFCSPETVREEVLLTLTPC

SEQ ID NO: 568 - protein, 103 aa, Homo sapiens
  SITE (87): Xaa equals any of the naturally occurring L-amino acids
RGTAKKQSGRIEVPTSARGPCHIWTVLWRRQLHHSVQLPPWWPPGQIIYNWQGAQSTQDEVAASAILTAQLDEELGGTPVQVSPAHXLSGLQPEPCPSLHSSV

SEQ ID NO: 569 - protein, 72 aa, Homo sapiens
LKVFHTGERLYPLIHDVHTQLAGKITGMLLEIDNSELLLMLESPESLHAKIDEAVAVLQAHQAMEQPKAYMH

SEQ ID NO: 570 - protein, 136 aa, Homo sapiens
  SITE (103): Xaa equals any of the naturally occurring L-amino acids
  SITE (105): Xaa equals any of the naturally occurring L-amino acids
  SITE (108): Xaa equals any of the naturally occurring L-amino acids
  SITE (116): Xaa equals any of the naturally occurring L-amino acids
  SITE (121): Xaa equals any of the naturally occurring L-amino acids
  SITE (135): Xaa equals any of the naturally occurring L-amino acids
SCQYGVQSNKDGSEKLEENNIMTQESRACSSVWKEFGSVGRCNVHRHFQGNSKQSPFPFAFPQILSVYIKPWVHIVVVIEGNWLNSTLVYGTFCGHLRKTSYXLXGGXCCPARGRXILTTXPPWPLSTFHGGHAXH

SEQ ID NO: 571 - protein, 79 aa, Homo sapiens
  SITE (13): Xaa equals any of the naturally occurring L-amino acids
  SITE (64): Xaa equals any of the naturally occurring L-amino acids
  SITE (71): Xaa equals any of the naturally occurring L-amino acids
  SITE (79): Xaa equals any of the naturally occurring L-amino acids
WTRTEIWILRCRXGGEGMVEIDSSPLLGWVISPNNYRETVFQLSFHCCFQKSGECGFRQGINDXIPWYYSXLWTFGSFX

SEQ ID NO: 572 - protein, 146 aa, Homo sapiens
  SITE (1): Xaa equals any of the naturally occurring L-amino acids
  SITE (6): Xaa equals any of the naturally occurring L-amino acids
  SITE (114): Xaa equals any of the naturally occurring L-amino acids
  SITE (141): Xaa equals any of the naturally occurring L-amino acids
XRGVGXQRCWNFVACLPVRACADMASNDYTQQATQSYGAYPTQPGQGYSQQSSQPYGQQSYSGYSQSTDTSGYGQSSYSSYGQSQNSESFSAGHLFLLFLNIAFLFLVFWRRSXVLLPRLECSGAVSASLQHQPTGFKRIXPASAS

SEQ ID NO: 573 - protein, 139 aa, Homo sapiens
GAAEKFREHRPTKLKSLLRLVNTGTSRPIILDPADPTLNVAEGYRWDIVAQRASQCLKQDCCYDNRENPISSWNVKRARDIHLTVEQRGYPDFNLIVNPYEPIRKVKEKIRRPGATLACSVCPSRFLAVRGSFSAAGAP

SEQ ID NO: 574 - protein, 101 aa, Homo sapiens
RRLKKKKTTIKKNTLNPVYNEAIIFDIPPENMDQVSLLISVMDYDRVGHNEIIGVCRVGITAEGLGRDHWNEMLAYPRKPIAHWHSLVEVKKSFKEGNPRL

SEQ ID NO: 575 - protein, 170 aa, Homo sapiens
  SITE (26): Xaa equals any of the naturally occurring L-amino acids
LHTLSKVNNEDPFRSATSSSVSNVVXTKNVFEETSVKSEDEPPALPPKIGTPTRPCPLPPGKRSINKLDSPDPFKLNDPFQPFPGNDSPKEKDPEIFCDPFTSATTTTNKEADPSNFANFSAYPSEEDMIEWAKRESEREEEQRLARLNQQEQEDLELAIALSKSEISEA

SEQ ID NO: 576 - protein, 269 aa, Homo sapiens
  SITE (8): Xaa equals any of the naturally occurring L-amino acids
  SITE (167): Xaa equals any of the naturally occurring L-amino acids
  SITE (213): Xaa equals any of the naturally occurring L-amino acids
  SITE (220): Xaa equals any of the naturally occurring L-amino acids
  SITE (234): Xaa equals any of the naturally occurring L-amino acids
LSGHTMIXTLLLSTLVAGALSCGDPTYPPYVTRVVGGEEARPNSWPWQVSLQYSSNGKWYHTCGGSLIANSWVLTAAHCISSSRTYRVGLGRHNLYVAESGSLAVSVSKIVVHKDWNSNQISKGNDIALLKLANPVSLTDKIQLACLPPAGTILPNNYPCYVTGWGXLQTNGAVPDVLQQGRLLVVDYATCSSSAWWGSSVKTSMICAGGDGXISSCNGXSGGPLNCQASDGRXQVTASSASGLASAATTTTSPPSSRGSPITSTGSIR

SEQ ID NO: 577 - protein, 503 aa, Homo sapiens
  SITE (140): Xaa equals any of the naturally occurring L-amino acids
  SITE (141): Xaa equals any of the naturally occurring L-amino acids
  SITE (143): Xaa equals any of the naturally occurring L-amino acids
  SITE (144): Xaa equals any of the naturally occurring L-amino acids
  SITE (145): Xaa equals any of the naturally occurring L-amino acids
  SITE (146): Xaa equals any of the naturally occurring L-amino acids
AWVAARGPGEPFAEERRTSVGMATNWGSLLQDKQQLEELARQAVDRALAEGVLLRTSQEPTSSEVVSYAPFTLFPSLVPSALLEQAYAVQMDFNLLVDAVSQNAAFLEQTLSSTIKQDDFTARLFDIHKQVLKEGIARLXXFXXXXDCVPGPESLRLHVPAQEDGSPALKQIEINTISASFGGLASRTPAVHRHVLSVLSKTKEAGKILSNNPSKGLALGIAKAWELYGSPNALVLLIAQEKERNIFDQRAIENELLARNIHVIRRTFEDISEKGSLDQDRRLFVDGQEIAVVYFRDGYMPRQYSLQNWEARLLLERSHAAKCPDIATQLAGTKKVQQELSRPGMLEMLLPGQPEAVARLRATFAGLYSLDVGEEGDQAIAEALAAPSRFVLKPQREGGGNNLYGEEMVQALKQLKDSEERASYILMEKIEPEPFENCLLRPGSPARVVQCISELGIFGVYVRQEKTLVMNKHVGHLLRTKAIEHADGGVAAGVAVLDNPYPV

SEQ ID NO: 578 - protein, 57 aa, Homo sapiens
  SITE (3): Xaa equals any of the naturally occurring L-amino acids
  SITE (41): Xaa equals any of the naturally occurring L-amino acids
LMXKLLEHQDTQSGKDHRFLVVSGSTRTFQIQEQRQWQRSXSGGHQGNGTIGLWVVL

SEQ ID NO: 579 - protein, 210 aa, Homo sapiens
TDHPGRTGRPTLPGKVTEEIVSSEHDEGLSFSGKVQCYGRELNQPASAAKCTGDFSPSPEKLVKSGNPLQPVSIENRNLDLKHLVLESSEPPFGPRNVIENKSLSDTLVSTTAPSGIVNVSVKQQTSPKSSQNHLFPGDLKTDEGIYLQVKSLTAASVDGAYSTQGCMCSVVPTLCSSSDNATLTHYVRPINAEPAFQAQNTSRQNGQFA

SEQ ID NO: 580 - protein, 154 aa, Homo sapiens
  SITE (146): Xaa equals any of the naturally occurring L-amino acids
EKIILATQVPCHVRIGGVRLPVVSVLIHFITSYRANMNVGVAHSEVNPNTRVMNSRGMWLTYALGVGLLHIVLLSIPFFSVPVAWTLTNIIHNLGMYVFLHAVKGTPFETPDQGKARLLTHWEQLDYGVQFTSSRKFFTISPIILXFLASSIRR

SEQ ID NO: 581 - protein, 133 aa, Homo sapiens
AVPSEFPGRPTRPQLLLEFSFWNEPVPRSGPNIYELRSYQLRPGTMIEWGNYWARAIRFRQDGNEAVGGFFSQIGQLYMVHHLWAYRDLQTREDIRNAAWHKHGWEELVYYTVPLIQEMESRIMIPLKTSPLQ

SEQ ID NO: 582 - protein, 59 aa, Homo sapiens
  SITE (4): Xaa equals any of the naturally occurring L-amino acids
  SITE (5): Xaa equals any of the naturally occurring L-amino acids
  SITE (14): Xaa equals any of the naturally occurring L-amino acids
GTVXXNLRKVNTWXITRSKTSATKSFISCFLKAVLCINNKWLYLTKCKVRILHIKLFFP

SEQ ID NO: 583 - protein, 92 aa, Homo sapiens
  SITE (14): Xaa equals any of the naturally occurring L-amino acids
  SITE (47): Xaa equals any of the naturally occurring L-amino acids
  SITE (70): Xaa equals any of the naturally occurring L-amino acids
GRVIEELGGIDRIXALQLHENRQIGQSALNIIEKHFGEKTSRSNLLXSKIKETVKPTRNQPSGRGEKTTXLSNERFPGQEHLGVRNRSLHPG

SEQ ID NO: 584 - protein, 460 aa, Homo sapiens
  SITE (23): Xaa equals any of the naturally occurring L-amino acids
  SITE (110): Xaa equals any of the naturally occurring L-amino acids
  SITE (421): Xaa equals any of the naturally occurring L-amino acids
  SITE (433): Xaa equals any of the naturally occurring L-amino acids
  SITE (437): Xaa equals any of the naturally occurring L-amino acids
  SITE (449): Xaa equals any of the naturally occurring L-amino acids
  SITE (450): Xaa equals any of the naturally occurring L-amino acids
ETCPDRGFPDWCWHQHRHRFADXTLPLASQESAVVEDLLYVLVGVDGRYVSAQPLAGRQSRTFLVDPNLDLSIRELVHRILPVAASYSAVTRFIEEKSSFEYGQVNHALXAAMRTLVKEHLILVSQLEQLHRQGLLSLQKLWFYIQPAMRTMDILASLATSVDKGECLGGSTLSLLHDRSFSYTGDSQAQELCLYLTKAASAPYFEVLEKWIYRGIIHDPYSEFMVEEHELRKERIQEDYNDKYWDQRYTIVQQQIPSFLQKMADKILSTGKYLNVVRECGHDVTCPVAKEIIYTLKERAYVEQIEKAFNYASKVLLDFLMEEKELVAHLRSIKRYFLMDQGDFFVHFMDLAEEELRKPVEDITPPRLEALLELALRMSTANTDPFKDDLKIDLMPHDLITQLLRVLAIETKQEKAMAHAXPTELALSGLGGXLLSXTSSSGPFRFIHXXGAGSAASGQL

SEQ ID NO: 585 - protein, 277 aa, Homo sapiens
VILDGLLTWGQFKQHYNRHFGFLGDFIGQVQSRKCIEDVIHFAWEEKLFLLADEVYQDNVYSPDCRFHSFKKVLYEMGPEYSSNVELASFHSTSKGYMGECGYRGGYMEVINLHPEIKGQLVKLLSVRLCPPVSGQAAMDIVVNPPVAGEESFEQFSREKESVLGNLAKKAKLTEDLFNQVPGIHCNPLQGAMYAFPRIFIPAKAVEAAQAHQMAPDMFYCMKLLEETGICVVPGSGFGQREGTYHFRMTILPPVEKLKTVLQKVKDFHINFLEKYA

SEQ ID NO: 586 - protein, 259 aa, Homo sapiens
  SITE (199): Xaa equals any of the naturally occurring L-amino acids
QRCFFLQTLLFLQSSIISAMAMASVKLLAGVLRKPDAWIGLWGVLRGTPSSYKLCTSWNRYLYFSSTKLRAPNYKTLFYNIFSLRLPGLLLSPECIFPFSVRLKSNIRSTKSTKKSLQKVDEEDSDEESHHDEMSEQEEELEDDPTVVKNYKDLEKAVQSFRYDVVLKTGLDIGRNKVEDAFYKGELRLNEEKLWKKSXTVKVGDTLDLLIGEDKEAGTETVMRILLKKVFEEKTESEKYRVVLRRWKSLKLPKKRMSK

SEQ ID NO: 587 - protein, 360 aa, Homo sapiens
  SITE (15): Xaa equals any of the naturally occurring L-amino acids
  SITE (315): Xaa equals any of the naturally occurring L-amino acids
  SITE (325): Xaa equals any of the naturally occurring L-amino acids
  SITE (326): Xaa equals any of the naturally occurring L-amino acids
  SITE (327): Xaa equals any of the naturally occurring L-amino acids
  SITE (339): Xaa equals any of the naturally occurring L-amino acids
LNPGRPARPVLLRSXAPPLEKMFSMRIVCLVLSVVGTAWTADSGEGDFLAEGGGVRGPRVVERHQSACKDSDWPFCSDEDWNYKCPSGCRMKGLIDEVNQDFTNRINKLKNSLFEYQKNNKDSHSLTTNIMEILRGDFSSANNRDNTYNRVSEDLRSRIEVLKRKVIEKVQHIQLLQKNVRAQLVDMKRLEVDIDIKIRSCRGSCSRALAREVDLKDYEDQQKQLEQVIAKDLLPSRDRQHLPLIKMKPVPDLVPGNFKSQLQKVPPEWKALTDMPQMRMELERPGGNEITRGGSTSYGTGSETESPRNPSSAGXWNSGSSGTWXXXNLETWELWTWKXWKLELWELWNWKYWKPKPWEP

SEQ ID NO: 588 - protein, 88 aa, Homo sapiens
RCLLELQMHSGLLPRPETFSLRKALRTLDSLLRLLAQLHTPSRTVEQLMLHAAKLLYFKGNRSSTLLHPCFHTPHFTPLLFSDPPLAL

SEQ ID NO: 589 - protein, 42 aa, Homo sapiens
IASGRSRGSKLTYACMRRHSSSIVSPKFNSLAVVLQRDWFEK

SEQ ID NO: 590 - protein, 35 aa, Homo sapiens
  SITE (15): Xaa equals any of the naturally occurring L-amino acids
  SITE (21): Xaa equals any of the naturally occurring L-amino acids
TASGAANLSISVKCXRARTPXTSLATGHPELQTWR

SEQ ID NO: 591 - protein, 227 aa, Homo sapiens
  SITE (1): Xaa equals any of the naturally occurring L-amino acids
XSFFRYRQCLCVPVVANFKKRCFSELIRPWHKTVTIGFGVTLCAVPIAQKSEPHSLSSEALMRRAVSLVTDSTSTFLSQTTYALIEAITEYTKAVYTLTSLYRQYTSLLGKMNSEEEDEVWQVIIGARAEMTSKHQEYLKLETTWMTAVGLSEMAAEAAYQTGADQASITARNHIQLVKLQVEEVHQLSRKAETKLAEAQIEELRQKTQEEGEERAESEQEAYLRED

SEQ ID NO: 592 - protein, 178 aa, Homo sapiens
RQRKIQKDRLVAEFTTSLTNFQKVQRQAAEREKEFVARVRASSRVSGSFPEDSSKERNLVSWESQTQPQVQVQDEEITEDDLRLIHERESSIRQLEADIMDINEIFKDLGMMIHEQGDVIDSIEANVENAEVHVQQANQQLSRAADYQRKSRKTLCIIILILVIGVAIISLIIWGLNH

SEQ ID NO: 593 - protein, 94 aa, Homo sapiens
  SITE (14): Xaa equals any of the naturally occurring L-amino acids
MATSTSTEAKSASXWNYFFLYDGSKVKEEGDPTRAGICYFYPSQTLLDQQELLCGQIAGVVRCVSDISDSPPTLVRLRKLKFAIKVDGDYLWVS

SEQ ID NO: 594 - protein, 132 aa, Homo sapiens
  SITE (94): Xaa equals any of the naturally occurring L-amino acids
TNRAGICLLDLSCGVPLLLGESLGIKNNHQPGKLLCFLADVIPHWYRCYSVLGGSAGKPGGTSVSVMKPLTAFLTEEPSVIYWGRSSVELSALXRKHVEEGRRRFPCWACFVEGQEQQVMCTCRCSTSLCFP

SEQ ID NO: 595 - protein, 97 aa, Homo sapiens
  SITE (38): Xaa equals any of the naturally occurring L-amino acids
SHFYCNSFSFSRAQIDQAAVPYSAGQDYSSIPASSTQXRVWGGLFCACSPHLTLGCHHLWRLLFGMMLPLAFSCYHGLGRKHGFQIIWELLAMVPPS

SEQ ID NO: 596 - protein, 510 aa, Homo sapiens
  SITE (30): Xaa equals any of the naturally occurring L-amino acids
  SITE (62): Xaa equals any of the naturally occurring L-amino acids
  SITE (117): Xaa equals any of the naturally occurring L-amino acids
  SITE (299): Xaa equals any of the naturally occurring L-amino acids
YSSSSEEVESSEDDEEEGEGGPAEGSRDTXGGRSDGDTDSVTPWWSTTSRRSPGPSPHTGRXPWWSSAPLKRSGTCCMLTAMGTQTCLTWSSPATHPPRTAKAKAHPRRMGVVDYQXRGLVKAPGKSSFTMFVDLGIYQPGGSGDSIPITALVGGEGTRFDQLQYDVRKGSVVNVNPTNTRAHSETPEIRKYKKRFNSEILCAALWGVNLLVGTENGLMLLDRSGQGKVYGLIGRRRFQQMDVLEGLNLLITISGKRNKLRVYYLSWLRNKILHNDPEVEKKQGWTTVGDMEGCGHYRXVKYERIKFLVIALKSSVEVYAWAPKPYHKFMAFKSFADLPHRPLLVDLTVEEGQRLKVIYGSSAGFHAVDVDSGNSYDIYIPVHIQSQITPHAIIFLPNTDGMEMLLCYEDEGVYVNTYGRIIKDVVLQWGEMPTSVAYICSNQIMGWGEKAIEIRSVETGHLDGVFMHKRAQRLKFLCERNDKVFFASVRSGGSSQVYFMTLNRNCIMNW

SEQ ID NO: 597 - protein, 90 aa, Homo sapiens
  SITE (38): Xaa equals any of the naturally occurring L-amino acids
  SITE (39): Xaa equals any of the naturally occurring L-amino acids
LISNRNSVFSSTVNVGSKHSGTCRTYKFVTVIDVIMLXXDLLSEMRTYPSYYESCWQSALSWQPQGNGLSCREPPQLGNKHLALFDSGHF

SEQ ID NO: 598 - protein, 184 aa, Homo sapiens
GTRAPRVQLARSGGRPPRTPRPPGPPGEVIQPLPIQASRTRRNIDASQLLDDGNGENYVDYADGMEEIFGSLNSLKLEIEQMKRPLGTQQNPARTCKDLQLCHPDFPDGEYWVDPNQGCSRDSFKVYCNFTAGGSTCVFPDKKSEGPESLLGPKKTRAPGSVNSSVGNCSPMWTPRATLWVWYR

SEQ ID NO: 599 - protein, 104 aa, Homo sapiens
GRGSAKKRPLPLVGIGMSKNTVSSARFRKVDVDEYDENKFVDEEDGGDGQAGPDEGEVDSCLRQYPCIHRPPHPSPAQPALLLGPGSLQDPRGTGAELPSQPAA

SEQ ID NO: 600 - protein, 122 aa, Homo sapiens
  SITE (22): Xaa equals any of the naturally occurring L-amino acids
TEFKKLSKGKSLLGAFIPRCNXEGYYKATQCHGSTGQCWCVDKYGNELAGSRKQGAVSCEEEQETSGDFGSGGSVVLLDDLEYERELGPKDKEGKLRVHTRAVTEDDEDEDDDKEDEVGYIW

SEQ ID NO: 601 - protein, 306 aa, Homo sapiens
ACPRPTARWQLRFWTHGYGYRRSGRDKYGPPTRTEYRLIVENLSSRCSWQDLKDYMRQAGEVTYADAHKGRKNEGVIEFVSYSDMKRALEKLDGTEVNGRKIRLVEDKPGSRRRRSYSRSRSHSRSRSRSRHSRKSRSRSGSSKSSHSKSRSRSRSGSRSRSKSRSRSQSRSRSKKEKSRSPSKDKSRSRSHSAGKSRSKSKDQAEEKIQNNDNVGKPKSRSPSRHKSKSKSRSRSQERRVEEEKRGSVSRGRSQEKSLRQSRSRSRSKAGQQEPEQEPQQEQGQEEEQEEKQRGEPQSQSQPQQE

SEQ ID NO: 602 - protein, 166 aa, Homo sapiens
  SITE (9): Xaa equals any of the naturally occurring L-amino acids
  SITE (56): Xaa equals any of the naturally occurring L-amino acids
  SITE (166): Xaa equals any of the naturally occurring L-amino acids
RTILGKCMXQTNSTFTFTTCRILHPSDELTRVTPSLNSAPTPACGSTSHLKSTPVXTPCTPRRLSLAESFTNTRESTTTMSTSLGLVWLLKERGISAAVYDPQSWDRAGRGSLLHSYTPKMAVIPSTPPNSPMQTPTSSPPSFEFKCTSPPYDNFLASKPRRLHPX

SEQ ID NO: 603 - protein, 128 aa, Homo sapiens
  SITE (88): Xaa equals any of the naturally occurring L-amino acids
PPARAPECSPSGSLLGSPLWRPCPRVLLPRGLLCIRRLRLQGYPARLPSPRAEFALLPESFERRTNFWQDGNLDEPVRSRTPLISQAXRHPHLLGKEGRQLVPDLGEQLQTACLEQPPYSSLAGKEGT

SEQ ID NO: 604 - protein, 595 aa, Homo sapiens
  SITE (18): Xaa equals any of the naturally occurring L-amino acids
  SITE (25): Xaa equals any of the naturally occurring L-amino acids
  SITE (46): Xaa equals any of the naturally occurring L-amino acids
  SITE (57): Xaa equals any of the naturally occurring L-amino acids
  SITE (551): Xaa equals any of the naturally occurring L-amino acids
GHENWLSPTWYCSGVAGXQAATGFXVDPVSNLRLPVEEAYKRGLVXIEFKEKLLSAXRAVTGYNDPETGNIISLFQAMNKELIEKGHGIRLLEAQIATGGIIDPKESHRLPVDIAYKRGYFNEELSEILSDPSDDTKGFFDPNTEENLTYLQLKERCIKDEETGLCLLPLKEKKKQVQTSQKNTLRKRRVVIVDPETNKEMSVQEAYKKGLIDYETFKELCEQECEWEEITITGSDGSTRVVLVDRKTGSQYDIQDAIDKGLVDRKFFDQYRSGSLSLTQFADMISLKNGVGTSSSMGSGVSDDVFSSSRHESVSKISTISSVRNLTIRSSSFSDTLEESSPIAAIFDTENLEKISITEGIERGIVDSITGQRLLEAQACTGGIIHPTTGQKLSLQDAVSQGVIDQDMATRLKPAQKAFIGFEGVKGKKKMSAAEAVKEKWLPYEAGQRFLEFQYLTGGLVDPEVHGRISTEEAIRKGFIDGRAAQRLQDTSSYAKILTCPKTKLKISYKDAINRSMVEDITGLRLLEAASVSSKGLPSPYNMSSAPGSRXGSRSGSRSGSRSGSRSGSRRGSFDATGNSSYSYSYSFSSSSIGH

SEQ ID NO: 605 - protein, 212 aa, Homo sapiens
  SITE (76): Xaa equals any of the naturally occurring L-amino acids
APTVSLVWQVFYYSTSIFEKAGVQQPVYATIGSGIVNTAFTVVSLFVVERAGRRTLHLIGLAGMAGCAILMTIALXLLEQLPWMSYLSIVAIFGFVAFFEVGPGPIPWFIVAELFSQGPRPAAIAVAGFSNWTSNFIVGMCFQYVEQLCGPYVFIIFTVLLVLFFIFTYFKVPETKGRTFDEIASGFRQGGASQSDKTPEELFHPLGADSQV

SEQ ID NO: 606 - protein, 83 aa, Homo sapiens
NQELTFPGCRVSIPPFLMTSRMFLTRKPTTFPESPSSWWVEKCSPRCAWFPSHVPVFKDSFTLVSELKCCLLKGFQERLCKGL

SEQ ID NO: 607 - protein, 136 aa, Homo sapiens
  SITE (25): Xaa equals any of the naturally occurring L-amino acids
  SITE (114): Xaa equals any of the naturally occurring L-amino acids
AAGLVAVLATVSYLPVPLYLGDPSXCTLLTNGWSAGEKSLCRPPSKPSVCAHGISKMGHCCVQNPGSSFCLQLLSLDAPETIQASFPILPLCFAFYPSTSITAFSSFQNSLFLXLFFMITKLLLPPWKITAIDACM

SEQ ID NO: 608 - protein, 378 aa, Homo sapiens
RRYSADSVWIDWKGLREYLGSMVAHDETGGLLPIKRTIRVLDVNNQSFREQEEPSNKRVRPLARVTSLANLISPVRNGAVRRFGQTIQSFTLRGDHRSPASAQKFSSRSTVPTPAKRRSSALWSEMLDITMKESLTTREIRRQEAIYEMSRGEQDLIEDLKLARKAYHDPMLKLSIMSEEELTHIFGDLDSYIPLHEDLLTRIGEATKPDGTVEQIGHILVSWLPRLNAYRGYCSNQLAAKALLDQKKQDPRVQDFLQRCLESPFSRKLDLWSFLDIPRSRLVKYPLLLKEILKHTPKEHPDVQLLEDAILIIQGVLSDINLKKGESECQYYIDKLEYLDEKQRDPRIEASKVLLCHGELRTRVDINFTFSCFKTSWF

SEQ ID NO: 609 - protein, 501 aa, Homo sapiens
  SITE (29): Xaa equals any of the naturally occurring L-amino acids
  SITE (30): Xaa equals any of the naturally occurring L-amino acids
PPQPQLLPQRKKKKVKMSLRFWKSRPVGXXQKRREEVNQRNVPGIDSAYLAMDTEEGVEVVWNEVQFSERKNYKLQEEKVRAVFDNLIQLEHLNIVKFHKYWADIKENKARVIFITEYMSSGSLKQFLKKTKKNHKTMNEKAWKRWCTQILSALSYLHSCDPPIIHGNLTCDTIFIQHNGLIKIGSVAPDTINNHVKTCREEQKNLHFFAPEYGEVTNVTTAVDIYSFGMCALEMAVLEIQGNGESSYVPQEAISSAIQLLEDPLQREFIQKCLQSEPARRPTARELLFHPALFEVPSLKLLAAHCIVGHQHMIPENALEEITKNMDTSAVLAEIPAGPGREPVQTLYSQSPALELDKFLEDVRNGIYPLTAFGLPRPQQPQQEEVTSPVVPPSVKTPTPEPAEVETRKVVLMQCNIESVEEGVKHHLTLLLKLEDKLNRHLSCDLMPNENIPELAAELVQLGFISEADQSRLTSLLEETLNKFNFARNSTLNSAAVTVSS

SEQ ID NO: 610 - protein, 77 aa, Homo sapiens [sequence omitted]

SEQ ID NO: 611 - protein, 243 aa, Homo sapiens
  SITE (185): Xaa equals any of the naturally occurring L-amino acids
  SITE (237): Xaa equals any of the naturally occurring L-amino acids
  SITE (238): Xaa equals any of the naturally occurring L-amino acids
  SITE (243): Xaa equals any of the naturally occurring L-amino acids
EGEKISANENSLAVRSTPAEDDSRDSQVKSEVQQPVHPKPLSPDSRASSLSESSPPKAMKKFQAPARETCVECQKTVYPMERLLANQQVFHISCFRCSYCNNKLSLGTYASLHGRIYCKPHFNQLFKSKGNYDEGFGHRPHKDLWASKNENEEILERPAQLANARETPHSPGVEDAPIAKVGVLXASMEAKASSQQEKEDKPAETKKLRIAWPPPTELGSSGSALEEGIKMSKPKWXXEDESX

SEQ ID NO: 612 - protein, 115 aa, Homo sapiens
  SITE (39): Xaa equals any of the naturally occurring L-amino acids
MRTNSFAEDLDLEGETLLTPITHISQLREHHRATIKVIXRMQYFVAKKKFQQARKPYDVRDVIEQYSQGHLNLMVRIKELQRRLDQSIGKPSLFISVSEKSKDRGTTRSAPAGTE

SEQ ID NO: 613 - protein, 175 aa, Homo sapiens
  SITE (52): Xaa equals any of the naturally occurring L-amino acids
INMARMNRPAPVEVTYKNMRFLITHNPTNATLNKFIEELKKYGVTTIVRVCXATYDTTLVEKEGIHVLDWPFDDGAPPSNQIVDDWLSLVKIKFREEPGCCIAVHCVAGLGRAPVLVALALIEGGMKYEDAVQFIRQKRRGAFNSKQLLYLEKYRPKMRLRFKDSNGHRNNCCIQ

SEQ ID NO: 614 - protein, 143 aa, Homo sapiens
TSNTSYLLLDLLAQHITINTCKITCIWLYFYLLAPRREKKINFESQLGIDALIFGYFFRIFNLLWSGLRSSVVSGFVHKRKAQKLNAHGACAFCAPNIWMRFFFQAYSQICVQNFLTFLLCIIIEFIAADFYNDSCCHVSLNN

SEQ ID NO: 615 - protein, 131 aa, Homo sapiens
  SITE (19): Xaa equals any of the naturally occurring L-amino acids
PHHHSWLCLPPPTPAVPLXMEKILILLLVALSVAYAAPGPRGIIINLENGELCMNSAQCKSNCCQHSSALGLARCTSMASENSECSVKTLYGIYYKCPCERGLTCEGDKTIVGSITNTNFGICHDAGRSKQ

SEQ ID NO: 616 - protein, 162 aa, Homo sapiens
  SITE (1): Xaa equals any of the naturally occurring L-amino acids
  SITE (137): Xaa equals any of the naturally occurring L-amino acids
  SITE (148): Xaa equals any of the naturally occurring L-amino acids
XRVLLAQQEARTEFLRKKARHQNSLPELEAAEAGAPGSGPVDLFRELLEEGKGVIRGNKEYEEEKRQEKERQEKALGILTYLGQSAAEAQTQPPWYQLPPGRGGPPPGPAPDEKIKSRLDPLREMQKHLGKKRQHGXDEGSRSRKEKXGSEKQRPKEPPSLG

SEQ ID NO: 617 - protein, 288 aa, Homo sapiens
  SITE (78): Xaa equals any of the naturally occurring L-amino acids
  SITE (279): Xaa equals any of the naturally occurring L-amino acids
GCGDSLSSGGGACRAAAALTVRSPAVPCRREHALFHSRNRVPQRGQRRLRYVAYNIHVNGVLHCRVRYSQLLGLHEQXRKEYGANVLPAFPPKKLFSLTPAEVEQRREQLEKYMQAVRQDPLLGSSETFNSFLRRAQQETQQVPTEEVSLEVLLSNGQKVLVNVLTSDQTEDVLEAVAAKLDLPDDLIGYFSLFLVREKEDGAFSFVRKLQEFELPYVSVTSLRSQEYKIVLRKSYWDSAYDDDVMENRVGLNLLYAQTVSDIERGWILVTKEQHRQLXISAREKFSQ

SEQ ID NO: 618 - protein, 189 aa, Homo sapiens
  SITE (167): Xaa equals any of the naturally occurring L-amino acids
  SITE (184): Xaa equals any of the naturally occurring L-amino acids
  SITE (188): Xaa equals any of the naturally occurring L-amino acids
AQSKMAALRALCGFRGVAAQVLRPGAGVRLPIQPSRGVRQWQPDVEWAQQFGGAVMYPSKETAHWKPPPWNDVDPPKDTIVKNITLNFGPQHPAAHGVLRLVMELSGEMVRKCDPHIGLLHRGTEKLIEYKTYLQALPYFDRLDYVSMMCNEQAYFSSCGEVAKHPXSSSGTWIRVCLEKYTFXEHIXL

SEQ ID NO: 619 - protein, 245 aa, Homo sapiens
DYRGSHGMAFTFFEYRAYRSIIKDYFHRGAKWTTAPKPTMADELYNQDYPIHSVEDRHKLAAQGKFVTTEFEPCFDAADFIRAGRDIFAQRSQVTNYLGIEWMRRHLAPDYRVHIISFKDPNPMHIDATFNIIGPGIVLSNPDRPCHQIDLFKKAGWTIITPPTPIIPDDHPLWMSSKWLSMNVLMLDEKRVMVDANEVPIQKMFEKLGITTIKVNIRNANSLGGGFHCWTCDVRRRGTLQSYLD

SEQ ID NO: 620 - protein, 40 aa, Homo sapiens
NLEHLGGGRKYPSYLDPYFFLSSLHFQWKPHFYFRIRKLS

SEQ ID NO: 621 - protein, 82 aa, Homo sapiens
  SITE (30): Xaa equals any of the naturally occurring L-amino acids
  SITE (41): Xaa equals any of the naturally occurring L-amino acids
  SITE (47): Xaa equals any of the naturally occurring L-amino acids
  SITE (48): Xaa equals any of the naturally occurring L-amino acids
NAFICTFRVESCFLLKPFLIDILRAIFLNXPDLLVSEPSTXSFPPQXXGGDSENQGRAQEKVLSEHGFSLVTSDTSQEEQTS

SEQ ID NO: 622 - protein, 249 aa, Homo sapiens
  SITE (48): Xaa equals any of the naturally occurring L-amino acids
  SITE (61): Xaa equals any of the naturally occurring L-amino acids
  SITE (103): Xaa equals any of the naturally occurring L-amino acids
  SITE (147): Xaa equals any of the naturally occurring L-amino acids
GERERERAGFPSIPVGKSPMVEQAVQTGSADNLNAKKLLPGKGTTGTXLNGRQAQPSSKTXSDVVQPAAVQAQGQVNDENRRPQRRRSGNRRTRNRSRGQNRXTNVKENTIKFEGDFDFESANAQFNREELDKEFKKKLNFKDDKAXKGEEKDLAVVTQSAEAPAEEDLLGPNCYYDKSKSFFDNISSELKTSSRRTTWAEERKLNTETFGVSGRFLRGRSSRGGFRGGRGNGTTRRNPTSHRAGTGRV

SEQ ID NO: 623 - protein, 326 aa, Homo sapiens
  SITE (302): Xaa equals any of the naturally occurring L-amino acids
REPRAWGGGGGRGGWGRRRFPGPGLQLGGEAEPVLPPLGSGRRAPEDGRAAHHGAHLLQGDEIWNALTDNYGNVMPVDWKSSHTRTLHLLTLNLSEKGVSDSLLFDTSDDEELREQLDMHSIIVSCVNDEPLFTADQVIEEIEEMMQESPDPEDDETPTQSDRLSMLSQEIQTLKRSSTGSYEERVKRLSVSELNEILEEIETAIKEYSEELVQQLALRDELEFEKEVKNSFISVLIEVQNKQKEHKETAKKKKKLKNGSSQNGKNERSHMPGTYLTTVIPYEKKNGPPSVEDLQILTKILXAMKEDSEKVPSLLTDYILKVLCPT

SEQ ID NO: 624 - protein, 245 aa, Homo sapiens
  SITE (5): Xaa equals any of the naturally occurring L-amino acids
  SITE (108): Xaa equals any of the naturally occurring L-amino acids
  SITE (112): Xaa equals any of the naturally occurring L-amino acids
ERACXGALLQHLGSWDQDCPDVVPTGLPKSGRHPQPGLPDNPAGHRLKHYSDFLERMPREEATEIEQTVQKAAQAFNSGLLCVACGSYRRGKATCGDVDVLITHPDGXSHRXIFSRLLDSLRQEGFLTDDLVSQEENGQQQKYLGVCRLPGPGRRHRRLDIIVVPYSEFACALLYFTGSAHFNRSMRALAKTKGMSLSEHALSTAVVRNTHGCKVGPGRVLPTPTEKDVFRLLGLPYREPAERDW

SEQ ID NO: 625 - protein, 150 aa, Homo sapiens
GERGGSPEPLRWESPLLGPSLPSSPKLYTGCSDQPTTHQASPPLCPRLLAPAAPGSWFILPPLSLPASPSVLTWLQPSSCSPWGKAASLLLSLHSLAPSLSPCLCQVPPLSQASEQPWRQEGHVKSFFTVLRRQVEGEDSGGGSGTISLL

SEQ ID NO: 626 - protein, 235 aa, Homo sapiens
DGVWVSIRLDSTLRLYHAHTYQHLQDVDIEPYVSKMLGTGKLGFSFVRITALMVSCNRLWVGTGNGVIISIPLTETVILHQGRLLGLRANKTSGVPGNRPGSVIRVYGDENSDKVTPGTFIPYCSMAHAQLCFHGHRDAVKFFVAVPGQVISPQSSSSGTDLTGDKAGPSAQEPGSQTPLKSMLVISGGEGYIDFRMGDEGGESELLGEDLPLEPSVTKAERSHLIVWQVMYGNE

SEQ ID NO: 627 - protein, 131 aa, Homo sapiens
FGTSFPSCSVVVFSLLLLLLLRLGEPSWGRMVCEKCEKKLGTVITPDTWKDGARNTTESGGRKLNENKALTSKKARFDPYGKNKFSTCRICKSSVHQPGSHYCQGCAYKKGICAMCGKKVLDTKNYKQTSV

SEQ ID NO: 628 - protein, 64 aa, Homo sapiens
LLMVTFLVCSRKTCRLYARYVNKDCGLKGEKLIIHTHDKNSYFLFLCLFIQKQVRAEKVSSYST

SEQ ID NO: 629 - protein, 396 aa, Homo sapiens
VGPACEQTRPLRAPPSSQDKIPQQNSESAMAKPQVVVAPVLMSKLSVNAPEFYPSGYSSSYTESYEDGCEDYPTLSEYVQDFLNHLTEQPGSFETEIEQFAETLNGCVTTDDALQELVELIYQQATSIPNFSYMGARLCNYLSHHLTISPQSGNFRQLLLQRCRTEYEVKDQAAKGDEVTRKRFHAFVLFLGELYLNLEIKGTNGQVTRADILQVGLRELLNALFSNPMDDNLICAVKLLKLTGSVLEDAWKEKGKMDMEEIIQRIENVVLDANCSRDVKQMLLKLVELRSSNWGRVHATSTYREATPENDPNYFMNEPTFYTSDGVPFTAADPDYQEKYQELLEREDFFPDYEENGTDLSGAGDPYLDDIDDEMDPEIEEAYEKFCLESERKRKQ

SEQ ID NO: 630 - protein, 189 aa, Homo sapiens
  SITE (31): Xaa equals any of the naturally occurring L-amino acids
LILGELEKGQSQFQALCFVTQLQHNEIIPSXAMAKLRQKNPRAVRQAEEVRGLEHLHMDVAVNFSQGALLSPHLHNVCAEAVDAIYTRQEDVRFWLEQGVDSSVFEALPKASEQAELPRCRQVGDRGKPCVCHYGLSLAWYPCMLKYCHSRDRPTPYKCGIRSCQKSYSFDFYVPQRQLCLWDEDPYPG

SEQ ID NO: 631 - protein, 32 aa, Homo sapiens
FPLAMAPFSTSAFHSNSHRRIARTQGVEVAVS

SEQ ID NO: 632 - protein, 144 aa, Homo sapiens
  SITE (17): Xaa equals any of the naturally occurring L-amino acids
  SITE (31): Xaa equals any of the naturally occurring L-amino acids
  SITE (86): Xaa equals any of the naturally occurring L-amino acids
  SITE (87): Xaa equals any of the naturally occurring L-amino acids
  SITE (89): Xaa equals any of the naturally occurring L-amino acids
HVPARQSLVLFPEQDDXKRTLLDPTLKAEGXKPQEALSATPREEHKGLHNATHPLLAKCYPDGGGCEGIAPSHIHSLCGLSSSGQXXAXSGLSSLCSVCGDRFHARTPSSSIPHFTPSHTSSIQGLLNCQEQVLEFPSPAESFS

SEQ ID NO: 633 - protein, 102 aa, Homo sapiens
  SITE (29): Xaa equals any of the naturally occurring L-amino acids
GCTKTSCVTPQSCLWVPSQSQGKSPGEYXSQQRILTCSRIWFDFPTIWVDALPVTVAVPIRQMKGSAPHVSWNDGPVFRDLTEPTSKTSENRKKEEDTGINS

SEQ ID NO: 634 - protein, 70 aa, Homo sapiens
  SITE (67): Xaa equals any of the naturally occurring L-amino acids
VQKNYFEYLNICCIFFRIYNMSSFRMGIYVCLPTFTVKVCYLYMSNWLNTVMRINCTEFILKKKKKXPGG

SEQ ID NO: 635 - protein, 297 aa, Homo sapiens
  SITE (222): Xaa equals any of the naturally occurring L-amino acids
  SITE (242): Xaa equals any of the naturally occurring L-amino acids
  SITE (254): Xaa equals any of the naturally occurring L-amino acids
  SITE (268): Xaa equals any of the naturally occurring L-amino acids
  SITE (269): Xaa equals any of the naturally occurring L-amino acids
  SITE (274): Xaa equals any of the naturally occurring L-amino acids
  SITE (280): Xaa equals any of the naturally occurring L-amino acids
  SITE (282): Xaa equals any of the naturally occurring L-amino acids
  SITE (295): Xaa equals any of the naturally occurring L-amino acids
  SITE (296): Xaa equals any of the naturally occurring L-amino acids
RTDPEEEDSETTAAGVTVTVAVTCGAAGSSSSASGPGASPGGSEAGSQGSGEGEGVQLTAAQELMIQQLVAAQLQCNKRSFSDQPKVTPWPLGADPQSRDARQQRFAHFTELAIISVQEIVDFAKQVPGFLQLGREDQIALLKASTIEIMLLETARRYNHETECITFLKDFTYSKDDFHRAGLQVEFINPIFEFSRAMRRLGLDDAEYALLIAINIFSADRXNVQEPGRVEALQQPYVGGAXVLHAHQEAAGPXAFPRMLHEAGEPAXXELLCXSEQVFXLXGFRDKETCRLLLXXN

SEQ ID NO: 636 - protein, 113 aa, Homo sapiens
  SITE (8): Xaa equals any of the naturally occurring L-amino acids
  SITE (87): Xaa equals any of the naturally occurring L-amino acids
VSAAGRAXRQLGAAEPREAEGAVAAATATTTTPARVPSLFPPQPPFSSLPYVPECGSTASFPAARLPPDLSARVGTMSLKFQGKQCXPTRMDPKSINLDLIGNLQHSLGGRIQ

SEQ ID NO: 637 - protein, 71 aa, Homo sapiens
  SITE (51): Xaa equals any of the naturally occurring L-amino acids
SWYLFCMDGFEFSFISDQVLSKYTVCHLHILAPSFKNGLLIRDVERVSHIXTLRDKSMCITNILCRGGVLR

SEQ ID NO: 638 - protein, 233 aa, Homo sapiens
  SITE (180): Xaa equals any of the naturally occurring L-amino acids
YEVLRDNTLVTLANISGQLDLSAYTESICLPILDGLLHWMVCPSAEAQDPFPTVGPNSVLSPQRLVLETLCKLSIQDNNVDLILATPPFSRQEKFYATLVRYVGDRKNPVCREMSMALLSNLAQGDALAARAIAVQKGSIGNLISFLEDGVTMAQYQQSQHNLMHMQPPPLEPPSVDMMXRAAKALLAMARVDENRSEFLLHEGRLLDISISAVLNSLVASVICDVLFQIGQL

SEQ ID NO: 639 - protein, 106 aa, Homo sapiens
FAAVGAGCVIFLLIIIFLTVLLLKLRKRHRKHTQQRAAALSLSTLASPKGGSGTAGTEPSDIIIPLRTTENNYCPHYEKVSGDYGHPVYIVQEMPPQSPANIYYKV

SEQ ID NO: 640 - protein, 164 aa, Homo sapiens
FMYVFSQGDRVVLFSQFTMMLDILEVLLKHHQHRYLRLDGKTQISERIHLIDEFNTDMDIFVFLLSTKAGGLGINLTSANVVILHDIDCNPYNDKQAEDRCHRVGQTKEVLVIKLISQGTIEESMLKINQQKLKLEQDMTTVDEGDEGSMPADIATLLKTSMGL

SEQ ID NO: 641 - protein, 45 aa, Homo sapiens
TYPFTLSLCANLILYYIPKLYIALFLSSILLYWTIVCSYANPTLF

SEQ ID NO: 642 - protein, 133 aa, Homo sapiens
  SITE (1): Xaa equals any of the naturally occurring L-amino acids
XFSQTVSAVCLPSADDDFPAGTLCATTGWGKTKYNANKTPDKLQQAALPLLSNAECKKSWGRRITDVMICAGASGVSSCMGDSGGPLVCQKDGAWTLVGIVSWGSDTCSTSSPGVYARVTKLIPWVQKILAAN

SEQ ID NO: 643 - protein, 146 aa, Homo sapiens
  SITE (2): Xaa equals any of the naturally occurring L-amino acids
  SITE (94): Xaa equals any of the naturally occurring L-amino acids
  SITE (126): Xaa equals any of the naturally occurring L-amino acids
  SITE (130): Xaa equals any of the naturally occurring L-amino acids
  SITE (133): Xaa equals any of the naturally occurring L-amino acids
  SITE (137): Xaa equals any of the naturally occurring L-amino acids
  SITE (143): Xaa equals any of the naturally occurring L-amino acids
QXFGQKTLWLLSCFSLVGAAFGCGVPAIHPVLSGLSRIVNGEDAVPGSWPWQVSLQDKTGFHFCGGSLISEDWVVTAAHCGVRTSDVVVAGEFXQGSDEENIQVLKIAKVFKNPKFSILTVNNDIXLLKXATXAPFXQTVSAXCLP

SEQ ID NO: 644 - protein, 349 aa, Homo sapiens
  SITE (110): Xaa equals any of the naturally occurring L-amino acids
KVPVTATAAGVCVWQGARPGERGVSRCRSWQCRRWWSTPWCCSVWWIISTESARLETRSVLLVCFWGHGKRKYLMYRTVLHSFDEDDKDDSVWFLDHDYLENMYGMFKKXNARERIVGWYHTGPKLHKNDIAINELMKRYCPNSVLVIIDVKPKDLGLPTEAYISVEEVHDDGTPTSKTFEHVTSEIGAEEAEEVGVEHLLRDIKDTTVGTLSQRITNQVHGLKGLNSKLLDIRSYLEKVATGKLPINHQIIYQLQDVFNLLPDVSLQEFVKAFYLKTNDQMVVVYLASLIRSVVALHNLINNKIANRDAEKKEGQEKEESKKDRKEDKEKDKDKEKSDVKKEEKKEKK

SEQ ID NO: 645 - protein, 124 aa, Homo sapiens
  SITE (86): Xaa equals any of the naturally occurring L-amino acids
  SITE (93): Xaa equals any of the naturally occurring L-amino acids
  SITE (94): Xaa equals any of the naturally occurring L-amino acids
  SITE (103): Xaa equals any of the naturally occurring L-amino acids
  SITE (104): Xaa equals any of the naturally occurring L-amino acids
  SITE (105): Xaa equals any of the naturally occurring L-amino acids
  SITE (109): Xaa equals any of the naturally occurring L-amino acids
  SITE (121): Xaa equals any of the naturally occurring L-amino acids
  SITE (122): Xaa equals any of the naturally occurring L-amino acids
RCSSPADTRRGCEVEQWDSDEPIPAKELERGVAGAHGLLCLLSDHVDKRILDAAGANLKVISTMSVGIDHLALDEIKKRGIRVGYXPDVLTDXXAELAVSLLXXXCRRXPEASEEVKNGGXXSW

SEQ ID NO: 646 - protein, 89 aa, Homo sapiens [sequence omitted]

SEQ ID NO: 647 - protein, 126 aa, Homo sapiens
  SITE (34): Xaa equals any of the naturally occurring L-amino acids
  SITE (40): Xaa equals any of the naturally occurring L-amino acids
  SITE (41): Xaa equals any of the naturally occurring L-amino acids
  SITE (42): Xaa equals any of the naturally occurring L-amino acids
  SITE (47): Xaa equals any of the naturally occurring L-amino acids
  SITE (61): Xaa equals any of the naturally occurring L-amino acids
  SITE (67): Xaa equals any of the naturally occurring L-amino acids
  SITE (70): Xaa equals any of the naturally occurring L-amino acids
  SITE (82): Xaa equals any of the naturally occurring L-amino acids
  SITE (88): Xaa equals any of the naturally occurring L-amino acids
  SITE (98): Xaa equals any of the naturally occurring L-amino acids
  SITE (102): Xaa equals any of the naturally occurring L-amino acids
  SITE (103): Xaa equals any of the naturally occurring L-amino acids
  SITE (117): Xaa equals any of the naturally occurring L-amino acids
ARAAPRRAEPTEPALRRPSSADRPLAPGPSSSPXAGRAPXXXASPSXSSEATGKPRGRDGXPRREEXDVXPEEKRLRLLLEXGSAQPXDCEDGEDAPXPGRXXTGTQTGGDGRGVSXAGAGVRGCR

SEQ ID NO: 648 - protein, 121 aa, Homo sapiens
KILNMQKSCEENEGKPQNMPKAEEDRPLEDVPQEAEGNPQPSEEGVSREAEGNPRGGPNQPGQGFKEDTPVRHLDPEEMIRGVDELERLREEIRRVRNKFVMMHWKQRHSRSRPYPVCFRP

SEQ ID NO: 649 - protein, 236 aa, Homo sapiens
  SITE (31): Xaa equals any of the naturally occurring L-amino acids
  SITE (114): Xaa equals any of the naturally occurring L-amino acids
TQMRWNCLRRRMQCWTRTRMSVWTRLPCGSXTEMGFPENRATKALQLNHMSVPQAMEWLIEHAEDPTIDTPLPGQAPPEAEGATAAASEAAAGASATDEEARDELTEIFKKIRXKREFRADARAVISLMEMGFDEKEVIDALRVNNNQQNAACEWLLGDRKPSPEELDKGIDPDSPLFQAILDNPVVQLGLTNPKTLLAFEDMLENPLNSTQWMNDPETGPVMLQISRIFQTLNRT

SEQ ID NO: 650 - protein, 119 aa, Homo sapiens
  SITE (108): Xaa equals any of the naturally occurring L-amino acids
SSVCMACTYVSNLGKKQRSVSFLASGLMRVSTGPELRLHHSFVLTGDVGRRICRLLVGLFTKGDTSSKRVHPFSPGPCFLLCDLARVGSSPKINVSPFYQNQTSTQRXLLSLCGKDVPL

SEQ ID NO: 651 - protein, 62 aa, Homo sapiens
NVKGQQEPVFLMSSCTRHKSKANTSLKSRNKYFSRFLLGHILTALGILIWSPNTKDPFRACY

SEQ ID NO: 652 - protein, 64 aa, Homo sapiens
WLNNLTRLTRTVNKLYVQDYNLDSLTVEPAPLIAIQYHNHHHHHHPYCLSDRFLGYWLDETEYM

SEQ ID NO: 653 - protein, 117 aa, Homo sapiens
  SITE (22): Xaa equals any of the naturally occurring L-amino acids
  SITE (93): Xaa equals any of the naturally occurring L-amino acids
  SITE (114): Xaa equals any of the naturally occurring L-amino acids
YFERWPPAGTGPEFPGRPTRPXPQAVRAGAVRKLDADEDGLPYLCTGYDLYVTREPCAMCAMALVHARILRVFYGAPSPDGALGTRFRIHARXDLNHRFQVFRGVLEEQCRWLXPDT

SEQ ID NO: 654 - protein, 68 aa, Homo sapiens
  SITE (29): Xaa equals any of the naturally occurring L-amino acids
  SITE (33): Xaa equals any of the naturally occurring L-amino acids
  SITE (63): Xaa equals any of the naturally occurring L-amino acids
VDPRVRTHASVKMVVLIDYKRKFYRIRIXKTTXGIGWQCQLALFFNILLFLLTLLYEGTGIKXTDIPF

SEQ ID NO: 655 - protein, 29 aa, Homo sapiens
PVWWHAPVVPATREAERGELLEPSKQRLQ

SEQ ID NO: 656 - protein, 110 aa, Homo sapiens
  SITE (106): Xaa equals any of the naturally occurring L-amino acids
ARGRTAPTRGRGNQGGSRETLTEVPWEPVVRRAELCGQTRGPCPPPVKPCCSRGSHEAEREECSPLCTQRLPSGPHGLPAHLGGPRDPTDPQWHWPKMLVCPQGQXAILL

SEQ ID NO: 657 - protein, 132 aa, Homo sapiens
ISWVCLNCQSQHLLKAPLSSSGHSGRIMGETEGKKDEADYKRLQTFPLVRHSDMPEEMRVETMELCVTACEKFSNNNESAAKMIKETMDKKFGSSWHVVIGEGFGFEITHEVKNLLYLYFGGTLAVCVWKCS

SEQ ID NO: 658 - protein, 161 aa, Homo sapiens
  SITE (9): Xaa equals any of the naturally occurring L-amino acids
  SITE (13): Xaa equals any of the naturally occurring L-amino acids
  SITE (68): Xaa equals any of the naturally occurring L-amino acids
AQPTQFPEXGAVXALGPRGQGGSSLPTPPWLSSTSWAATAPSPHIATYLEADVAKPAREPTWEVARTXWGPRTLVPPSITMWVLKTLDCLPDAPKPDLPGWGGENPTSPDLHHLHHHHHHHHHHYHHHPTGARVGKISPLDQTAPSMEKLEKNSGTHIQAW

SEQ ID NO: 659 - protein, 171 aa, Homo sapiens
  SITE (45): Xaa equals any of the naturally occurring L-amino acids
PPAPPVHISIMEGHYYDPLQFQGPIYTHGDSPAPLPPQGMLVQPXMNLPHPGLHPHQTPAPLPNPGLYPPPVSMSPGQPPPQQLLAPTYFSAPGVMNFGNPSYPYAPGALPPPPPPHLYPNTQAPSQVYGGVTYYNPAQQQVQPKPSPPRRTPQPVTIKPPPPEVVSRGSS

SEQ ID NO: 660 - protein, 215 aa, Homo sapiens
  SITE (85): Xaa equals any of the naturally occurring L-amino acids
  SITE (188): Xaa equals any of the naturally occurring L-amino acids
ESCLSATQDIMAAHLVKRCTCLLREAARQAPAMAPVGRLRLAWVAHKTLTSSATSPISHLPGSLMEPVEKERASTPYIEKQVDHXIKKATRPEELLELLGGSHDLDSNQAAMVLIRLSHLLSEKPEDKGLLIQDAHFHQLLCLLNSQIASVWHGTLSKLLGSLYALGIPKASKELQSVEQEVRWRMRXAQVQAPGLPGRVLCHPLTGAALAGAAG

SEQ ID NO: 661 - protein, 272 aa, Homo sapiens
  SITE (261): Xaa equals any of the naturally occurring L-amino acids
  SITE (262): Xaa equals any of the naturally occurring L-amino acids
DAGPLMGTSRDGDTTRQRIKFSDDRVCKSHLLNCCPHDVLSGTRMDLGECLKVHDLALRADYEIASKEQDFFFELDAMDHLQSFIADCDRRTEVAKKRLAETQEEISAEVAAKAERVHELNEEIGKLLAKVEQLGAEGNVEESQKVMDEVEKARAKKREAEEVYRNSMPASSFQQQKLRVCEVCSAYLGLHDNDRRLADHFGGKLHLGFIEIREKLEELKRVVAEKQEKRNQERLKRREEREREEREKLRRSRSHSKNPKXXRSRERSKRRY

SEQ ID NO: 662 - protein, 152 aa, Homo sapiens
  SITE (14): Xaa equals any of the naturally occurring L-amino acids
  SITE (89): Xaa equals any of the naturally occurring L-amino acids
TEPAAGVAVPFALXQHGRVPARAGPGARLVPARPHRHLRAHGEQAQSLDEKQKREEEEKKAEFERQRKIRQQEIEEKLIEEETARRVEXLVAKRVEEELEKRKDEIEREVLRRVEEAKRIMEKQLLEELERQRQAELAAQKAREVTLGPFGK

SEQ ID NO: 663 - protein, 59 aa, Homo sapiens
PQTFDYYMCIGDFDHPFLIFDFCVTYCHLLNCWPTRTGSIVWGVGESLHKEEKKLSGIL

SEQ ID NO: 664 - protein, 72 aa, Homo sapiens
CNLLIMPEGKHYFHTLLFLYLNFLKKKSSIALHSFLSDADLSFFSPFILNTMLHMNVEADTLHSSVDITTPM

SEQ ID NO: 665 - protein, 84 aa, Homo sapiens
  SITE (50): Xaa equals any of the naturally occurring L-amino acids
GETRGRCMQTSLELWSLLTFLPQAPLPRGPVTILHRDYPKTQRLSCACRXAQPVLIAALLFNQRDVNDQVIFARFVFNIFHLYR

SEQ ID NO: 666 - protein, 122 aa, Homo sapiens
ASGGGLSNSHLESPFCLFKSPSEGHSYQNSGLDHFQNSNIDQSFWETFGSAEPTKTRKSPSSDSWTCADTSTERRSSDSWEVWGSASTNRNSNSDGGEGGEGTKKAVPPAVPTDDGWDNQNW

SEQ ID NO: 667 - protein, 82 aa, Homo sapiens
RWGICEKDVPFIIYAIYSRCFERLQKRRPASLADKFIIILQKCAGCALANCTVLFTPAWVTEQDSRLGGLKKKKMLYLNESV

SEQ ID NO: 668 - protein, 566 aa, Homo sapiens
  SITE (178): Xaa equals any of the naturally occurring L-amino acids
  SITE (357): Xaa equals any of the naturally occurring L-amino acids
  SITE (518): Xaa equals any of the naturally occurring L-amino acids
STHASGEVVKPAAVLSKGEIVVKNNPNESVTANAATNSPSCTRADPKNVSIPSSEALSSDPSYNKEKHIIHPTQKSKASQGSDLEQNEASRKNKKKKEKSTSKYEVLTVQEPPRIEDAEEFPNLAVASERRDRIETPKFQSKQQPQDNFKNNVKKSQLPVQLDLGGMLTALEKKQHSXHAKQSSKPVVVSVGAVPVLSKECASGERGRRMSQMKTPHNPLDSSAPLMKKGKQREIPKAKKPTSLKKIILKERQERKQRLQENAVSPAFTSDDTQDGESGGDDQFPEQAELSGPEGMDELISTPSVEDKSEEPPGTELQRDTEASHLAPNHTTFPKIHSRRFRDYCSQMLSKEVDACXTDLLKELVRFQDRMYQKDPVKAKTKRRLVLGLREVLKHLKLKKLKCVIISPNCEKIQSKGGLDDTLHTIIDYACEQNIPFVFALNRKALGRSLNKAVPVSVVGIFSYDGAQDQFHKMVELTVAARQAYKTMLENVQQELVGEPRPQAPPSLPTQGPSCPAXDGPPALKEKEEPHYIEIWKKHLEAYSGCTLELEESLEASTSQMMNLNL

SEQ ID NO: 669 - protein, 114 aa, Homo sapiens
GFWDSGLCGLCLLAGNGLSLSRPAPPRLCLSEAPEPSSDLQNVASDGGLGWEMGRAYIVFCSLKTLIAPIFQRMVLCEQHASKREIGGRGSRGGWEKSGSFLPLTALTFCEREA

SEQ ID NO: 670 - protein, 154 aa, Homo sapiens
  SITE (146): Xaa equals any of the naturally occurring L-amino acids
  SITE (153): Xaa equals any of the naturally occurring L-amino acids
NQRLLNNLPSFPIFCGPTTLGDPRLGGAPPGLSRSFRLPPLPAAMAELGLNEHHQNEVINYMRFARSKRGLRLKTVDSCFQDLKESRLVEDTFTIDEVSEVLNGLQAVVHSEVESELINTAYTNVLLLRHCLHKLRSGILSYRQTXLNLKTEXY

SEQ ID NO: 671 - protein, 80 aa, Homo sapiens
  SITE (59): Xaa equals any of the naturally occurring L-amino acids
  SITE (60): Xaa equals any of the naturally occurring L-amino acids
  SITE (70): Xaa equals any of the naturally occurring L-amino acids
  SITE (72): Xaa equals any of the naturally occurring L-amino acids
  SITE (78): Xaa equals any of the naturally occurring L-amino acids
  SITE (80): Xaa equals any of the naturally occurring L-amino acids
CRQERAVAPARRAMERIPSAQPPPACLPKAPGLEHGDLPGMYPAHMYQVYKSRRGIKRXXDSKETYKLPXRXIEKRDXTX

SEQ ID NO: 672 - protein, 224 aa, Homo sapiens
  SITE (220): Xaa equals any of the naturally occurring L-amino acids
EPAEGPSSCDPICPAGLKALSLCVALPPGLAVSVLKAIFQEVHVQSLPQVDRHTVYNIITNFMRTREEELKSLGADFTFGFIQVMDGEKDPRNLLVAFRIVHDLISRDYSLGPFVEELFEVTSCYFPIDFTPPPNDPHGIQREDLILSLRAVLASTPRFAEFLLPLLIEKVDSEVLSAKLDSLQTLNACCAVYGQKELKDFLPSLWASIRREVFQTAVSXWRQR

SEQ ID NO: 673 - protein, 498 aa, Homo sapiens
  SITE (1): Xaa equals any of the naturally occurring L-amino acids
  SITE (405): Xaa equals any of the naturally occurring L-amino acids
  SITE (414): Xaa equals any of the naturally occurring L-amino acids
  SITE (445): Xaa equals any of the naturally occurring L-amino acids
XLSDGRLRVGYVSSDFGNHPTSHLMQSIPGMHNPDKFEVFCYALSPDDGTNFRVKVMAEANHFIDLSQIPCNGKAADRIHQDGIHILVNMNGYTKGARNELFALRPAPIQAMWLGYPGTSGALFMDYIITDQETSPAEVAEQYSEKLAYMPHTFFIGDHANMFPHLKKKAVIDFKSNGHIYDNRIVLNGIDLKAFLDSLPDVKIVKMKCPDGGDNADSSNTALNMPVIPMNTIAEAVIEMINRGQIQITINGFSISNGLATTQINNKAATGEEVPRTIIVTTRSQYGLPEDAIVYCNFNQLYKIDPSTLQMWANILKRVPNSVLWLLRFPAVGEPNIQQYAQNMGLPQNRIIFSPVAPKEEHVRRGQLADVCLDTPLCNGHTTGMDVLWAGTPMVTMPGRDSCFXELQHPSSLXLGCLELIAKNRQEYEDIAVKLGTDLEYLKKXRGKVWKQRISSPLFNTKQYTMELERLYLQMWEHYAAGNKPDHMIKPVEVTESA

SEQ ID NO: 674 - protein, 146 aa, Homo sapiens
  SITE (15): Xaa equals any of the naturally occurring L-amino acids
RDPAGSPSAAGGLAXVSLALGSGSRGRDHSGSGVGTAMAGALVRKAADYVRSKDFRDYLMSTHFWGPVANWGLPIAAINDMKKSPEIISGRMTFALCCYSLTFMRFAYKVQPRNWLLFACHATNEVAQLIQGGRLIKHEMTKTASA

SEQ ID NO: 675 - protein, 107 aa, Homo sapiens
  SITE (27): Xaa equals any of the naturally occurring L-amino acids
YSFDLILCLRECSGQVLCVVGWGGRVXSFPHPCVVVLLTVAPWDWLPFLLGEPGEPAHLVSRVCAWRSAPPALMALCHRQRPGGAVCAQPKHFTFFTLFFFFNQLIV

SEQ ID NO: 676 - protein, 90 aa, Homo sapiens
NTSHISYLTRLSWSCRFHCPPKTRTHTYPYTKGKTILKCCFSGGSLSGCCLTVWEPVLCRGDRPDLHYLTTLALGANCPTVKCLGGCPIP

SEQ ID NO: 677 - protein, 362 aa, Homo sapiens
IIMAPLGTTVLLWSLLRSSPGVERVCFRARIQPWHGGLLQPLPCSFEMGLPRRRFSSEAAESGSPETKKPTFMDEEVQSILTKMTGLNLQKTFKPAIQELKPPTYKLMTQAQLEEATRQAVEAAKVRLKMPPVLEERVPINDVLAEDKILEGTETTKYVFTDISYSIPHRERFIVVREPSGTLRKASWEERDRMIQVYFPKEGRKILTPIIFKEENLRTMYSQDRHVDVLNLCFAQFEPDSTEYIKVHHKTYEDIDKRGKYDLLRSTRYFGGMVWYFVNNKKIDGLLIDQIQRDLIDDATNLVQLYHVLHPDGQSAQGAKDQAAEGINLIKVFAKTEAQKGAYIELTLQTYQEALSRHSAAS

SEQ ID NO: 678 - protein, 53 aa, Homo sapiens
LQVDERRMFMFLYGLNKSVITMLTCSVIKCTNGSLCHSFIFSGYQDSQIKLLM

SEQ ID NO: 679 - protein, 395 aa, Homo sapiens
  SITE (1): Xaa equals any of the naturally occurring L-amino acids
  SITE (370): Xaa equals any of the naturally occurring L-amino acids
  SITE (377): Xaa equals any of the naturally occurring L-amino acids
XCRHSSLIFPPVSASSSSFQWFQSTVSKEDAMPEALKSLIFPNFEPLHKFHTNFLKEIEQRLALWEGRSNAQIRDYQRIGDVMLKNIQGMKHLAAHLWKHSEALEALENGIKSSRRLENFCRDFELQKVCYLPLNTFLLRPLHRLMHYKQVLERLCKHHPPSHADFRDCRAALAEITEMVAQLHGTMIKMENFQKLHELKKDLIGIDNLVVPGREFIRLGSLSKLSGKGLQQRMFFLFNDVLLYTSRGLTASNQFKVHGQLPLYGMTIEESEDEWGVPHCLTLRGQRQSIIVAASSRSEMEKWVEDIQMAIDLAEKSSSPAPEFLASSPPDNKSPDEATAADQESEDDLSASPHRWSARPRTAATQWCTXAGTATPXSPWWTSASQWRISCLETC

SEQ ID NO: 680 - protein, 156 aa, Homo sapiens
ARGKMEDEEVAESWEEAADSGEIDRRLEKKLKITQKESRKSKSPPKVPIVIQDDSLPAGPPPQIRILKRPTSNGVVSSPNSTSRPTLPVKSLAQREAEYAEARKRILGSASPEEEQEKPILDRPTRISQPEDSRQPNNVIRQPLGPDGSQGFKQRR

SEQ ID NO: 681 - protein, 144 aa, Homo sapiens
SAMAAAAEGVLATRSDEPARDDAAVETAEEAKEPAEADITELCRDMFSKMATYLTGELTATSEDYKLLENMNKLTSLKYLEMKDIAINISRNLKDLNQKYAGLQPYLDQINVIEEQVAALEQAAYKLDAYSKKLEAKYKKLEKR

SEQ ID NO: 682 - protein, 178 aa, Homo sapiens
  SITE (177): Xaa equals any of the naturally occurring L-amino acids
RAWSPSGRAYDPADYEHLPVSAEIKELFQYISRYTPQLIDLDHKLKPFIPDFIPAVGDIDAFLKVPRPDGKPDNLGLLVLDEPSTKQSDPTVLSLWLTENSKQHNITQHMKVKSLEDAEKNPKAIDTWIESISELHRSKPPATVHYTRPMPDIDTLMQEWSPEFEELLGKVSLPTAXD

SEQ ID NO: 683 - protein, 452 aa, Homo sapiens
  SITE (58): Xaa equals any of the naturally occurring L-amino acids
QFYLLFNKEALSNMDDYDKTCLESALVGVCNIVQQEWGGAIPCQVVLVTDGCLGIGRXSLRHSLATQNQRSESNRFPLPFPFPSKLYIMCMANLEELQSTDSLECLERLIDLNNGEGQIFTIDGPLCLKNVQSMFGKLIDLAYTPFHAVLKCGHLTADVQVFPRPEPFVVDEEIDPIPKVINTDLEIVGFIDIADISSPPVLSRHLVLPIALNKEGDEVGTGITDDNEDENSANQIAGKIPNFCVLLHGSLKVEGMVAIVQLGPEWHGMLYSQADSKKKSNLMMSLFEPGPEPLPWLGKMAQLGPISDAKENPYGEDDNKSPFPLQPKNKRSYAQNVTVWIKPSGLQTDVQKILRNARKLPEKTQTFYKELNRLRKAALAFGFLDLLKGVADMLERECTLLPETAHPDAAFQLTHAAQQLKLASTGTSEYAAYDQNITPLHTDFSGSSTERI

SEQ ID NO: 684 - protein, 427 aa, Homo sapiens
TGSEFPGRPTRPGTKAGYKLFSLSSVEQLDQVHGSNEIPDVYIVERLFSSSLVVVVSHTKPRQMNVYHFKKGTEICNYSYSSNILSIRLNRQRLLVCLEESIYIHNIKDMKLLKTLLDIPANPTGLCALSINHSNSYLAYPGSLTSGEIVLYDGNSLKTVCTIAAHEGTLAAITFNASGSKLASASEKGTVIRVFSVPDGQKLYEFRRGMKRYVTISSLVFSMDSQFLCASSNTETVHIFKLEQVTNSRPEEPSTWSGYMGKMFMAATNYLPTQVSDMMHQDRAFATARLNFSGQRNICTLSTIQKLPRLLVASSSGHLYMYNLDPQDGGECVLIKTHSLLGSGTTEENKENDLRPSLPQSYAATVARPSASSASTVPGYSEDGGALRGEVIPEHEFATGPVCLDDENEFPPIILCRGNQKGKTKQS

SEQ ID NO: 685 - protein, 321 aa, Homo sapiens
  SITE (154): Xaa equals any of the naturally occurring L-amino acids
GGRAGQSKDADLRPGDIIVAINGESAEGMLHAEAQSKIRQSPSPLRLQLDRSQATSPGQTNGDSSLEVLATRFQGSVRTYTESQSSLRSSYSSPTSLSPRAGSPFSPPPSSSSLTGEAAISRSFQSLACSPGLPAADRLSYSGRPGSRQAGLGXAGDSAVLVLPPSPGPRSSRPSMDSEGGSLLLDEDSEVFKMLQENREGRAAPRQSSSFRLLQEALEAEERGGTPAFLPSSLSPQSSLPASRALATPPKLHTCEKCSTSIANQAVRIQEGRYRHPGCYTCADCGLNLKMRGHFWVGDELYCEKHARQRYSAPATLSSRA

SEQ ID NO: 686 - protein, 71 aa, Homo sapiens
  SITE (34): Xaa equals any of the naturally occurring L-amino acids
FHPSYWFVCNEWLKIRVIFYPQMRFCTFRAGLNXFFFFFLYPNCWPHGNPFPDLCSTIYWQNGRVAAKQFV

SEQ ID NO: 687 - protein, 272 aa, Homo sapiens
  SITE (34): Xaa equals any of the naturally occurring L-amino acids
ALGGFVRLLPRCFGFPGSSALFSPVAAGSGRSAXWDFLLSPEEFNTNMDIRPNHTIYINNMNDKIKKEELKRSLYALFSQFGHVVDIVALKTMKMRGQAFVIFKELGSSTNALRQLQGFPFYGKPMRIQYAKTDSDIISKMRGTFADKEKKKEKKKAKTVEQTATTTNKKPGQGTPNSANTQGNSTPNPQVPDYPPNYILFLNNLPEETNEMMLSMLFNQFPGFKEVRLVPGRHDIAFVEFENDGQAGAARDALQGFKITPSHAMKITYAKK

SEQ ID NO: 688 - protein, 173 aa, Homo sapiens
HLFCRIVKNEVLFLEYLTGCLASRRCLAKALPEMDSRIPYDDYPVVFLPAYENPPAWIPPHERVHHPDYNNELTQFLPRTITLKKPPGAQLGFNIRGGKASQLGIFISKVIPDSDAHRAGLQEGDQVLAVNDVDFQDIEHSKAVEILKTAREISMRVRFFPYNYHRQKERTVH

SEQ ID NO: 689 - protein, 66 aa, Homo sapiens [sequence omitted]

SEQ ID NO: 690 - protein, 94 aa, Homo sapiens
GRGFLSHKNEILEIALDQKGLTNDRKIAFIDKNRDLCITSVKGFGKEEQIIKLGNNGAYFGMERYMQYPLWTSRYSIYSVVLPQYSLCGQRHFA

SEQ ID NO: 691 - protein, 66 aa, Homo sapiens
  SITE (38): Xaa equals any of the naturally occurring L-amino acids
  SITE (46): Xaa equals any of the naturally occurring L-amino acids
  SITE (50): Xaa equals any of the naturally occurring L-amino acids
  SITE (51): Xaa equals any of the naturally occurring L-amino acids
  SITE (53): Xaa equals any of the naturally occurring L-amino acids
NQNGVHVILFDISSPAQTIPEGIKFIQGDIRHLSDVEXSLPGCRRXLCVXXLXLMVMFRAGANSIE

SEQ ID NO: 692 - protein, 124 aa, Homo sapiens
  SITE (88): Xaa equals any of the naturally occurring L-amino acids
TKQGEKKELGQNRRRFPTRIHPRPRDTQSPHPQPARASRPQLLALGTAGSPARTRHKADQSRRRGGGGTTRRGFPGRCSPPAAPSLGXGGRLVWFSRPLAPTPTPPKQNRPPSLGWRTRLLAAS

SEQ ID NO: 693 - protein, 56 aa, Homo sapiens
  SITE (22): Xaa equals any of the naturally occurring L-amino acids
  SITE (32): Xaa equals any of the naturally occurring L-amino acids
  SITE (39): Xaa equals any of the naturally occurring L-amino acids
SMRTEISVLYRLPSLCCSVILXKQMETDGSAXSTRGTEXRGEVSPAIANQARGGGG

SEQ ID NO: 694 - protein, 70 aa, Homo sapiens [sequence omitted]

SEQ ID NO: 695 - protein, 273 aa, Homo sapiens
  SITE (27): Xaa equals any of the naturally occurring L-amino acids
  SITE (28): Xaa equals any of the naturally occurring L-amino acids
  SITE (34): Xaa equals any of the naturally occurring L-amino acids
GRVGMLRLLSSLLLVAVASGYGPPSSXXSSRVVXGEDAVPYSWPWQVSLQYEKSGSFYHTCGGSLIAPDWVVTAGHCISRDLTYQVVLGEYNLAVKEGPEQVIPINSEELFVHPLWNRSCVACGNDIALIKLSRSAQLGDAVQLASLPPAGDILPNKTPCYITGWGRLYTNGPLPDKLQQARLPVVDYKHCSRWNWWGSTVKKTMVCAGGYIRSGCNGDSGGPLNCPTEDGGWQVHGVTSFVSGFGCNFIWKPTVFTRVSAFIDWIEETIASH

SEQ ID NO: 696 - protein, 180 aa, Homo sapiens
  SITE (43): Xaa equals any of the naturally occurring L-amino acids
  SITE (157): Xaa equals any of the naturally occurring L-amino acids
  SITE (158): Xaa equals any of the naturally occurring L-amino acids
  SITE (162): Xaa equals any of the naturally occurring L-amino acids
  SITE (163): Xaa equals any of the naturally occurring L-amino acids
YLWSCPHNGWLSHNCGHHEDAGVICSASQSQPTPSPDTWPTSXASTAGSESTLALRLVNGGDRCRGRVEVLYQGSWGTVCDDYWDTNDANVVCRQLGCGWAMSAPGNAQFGQGSGPIVLDDVRCSGHESYLWSCPHNGWLSHNCGHHEDAGVICSAXXVPVXXQARYLADHQLTGIDSRI

SEQ ID NO: 697 - protein, 62 aa, Homo sapiens
  SITE (44): Xaa equals any of the naturally occurring L-amino acids
  SITE (57): Xaa equals any of the naturally occurring L-amino acids
VPCPPGHFPPMSPDFTVFMIKYLMTMIVGITTGFWIWSGKTLQXWRRFYHRLSHSSXGETAV

SEQ ID NO: 698 - protein, 134 aa, Homo sapiens
  SITE (121): Xaa equals any of the naturally occurring L-amino acids
  SITE (124): Xaa equals any of the naturally occurring L-amino acids
FFRSSSDNGSPIRQYELQPQHTRGQLWAWKQEPRNSQLRIVLVGKTGAGKSATGNSILGRKVFHSGTAAKSITKKCEKRSSSWKETELVVVDTPGIFDTEVPNAETSKEIIRCILLTSPGXHAXASGGSTGPLH

SEQ ID NO: 699 - protein, 371 aa, Homo sapiens
  SITE (32): Xaa equals any of the naturally occurring L-amino acids
DQFSRSLNNSATVQHVQKLWQPRGCTRTRRWXAEERGREPQGQAGGGASQAARCGAAPGGGRVEALGQFVMKTRRTLKGHGNKVLCMDWCKDKRRIVSSSQDGKVIVWDSFTTNKEHAVTMPCTWVMACAYAPSGCAIACGGLDNKCSVYPLTFDKNENMAAKKKSVAMHTNYLSACSFTNSDMQILTASGDGTCALWDVESGQLLQSFHGHGADVLCLDLAPSETGNTFVSGGCDKKAMVWDMRSGQCVQAFETHESDINSVRYYPSGDAFASGSDDATCRLYDLRADREVAIYSKESIIFGASSVDFSLSGRLLFAGYNDYTINVWDVLKGSRVSILFGHENRVSTLRVSPDGTAFCSGSWDHTLRVWA

SEQ ID NO: 700 - protein, 200 aa, Homo sapiens
SQAPPPPPPPSRPGPPPLPPSSSGNDETPRLPQRNLSLSSSTPPLPSPGRSGPLPPPPSERPPPPVRDPPGRSGPLPPPPPVSRNGSTSRALPATPQLPSRSGVDSPRSGPRPPLPPDRPSAGAPPPPPPSTSIRNGFQDSPCEDEWESRFYFHPISDLPPPEPYVQTTKSYPSKLARNESRSGSNRRERGAPPLPPIPR

SEQ ID NO: 701 - protein, 660 aa, Homo sapiens
  SITE (47): Xaa equals any of the naturally occurring L-amino acids
  SITE (397): Xaa equals any of the naturally occurring L-amino acids
HYFYLKERILELTLQRRKMVVSEVDIAKADPAAASHPLLLNGDATVXQKNPGSVAENNLCSQYEEKVRPCIDLIDSLRALGVEQDLALPAIAVIGDQSSGKSSVLEALSGVALPRGSGIVTRCPLVLKLKKLVNEDKWRGKVSYQDYEIEISDASEVEKEINKAQNAIAGEGMGISHELITLEISSRDVPDLTLIDLPGITRVAVGNQPADIGYKIKTLIKKYIQRQETISLVVVPSNVDIATTEALSMAQEVDPEGDRTIGILTKPDLVDKGTEDKVVDVVRNLVFHLKKGYMIVKCRGQQEIQDQLSLSEALQREKIFFENHPYFRDLLEEGKATVPCLAEKLTSELITHICKSLPLLENQIKETHQRITEELQKYGVDIPEDENEKMFFLIDKXNAFNQDITALMQGEETVGEEDIRLFTRLRHEFHKWSTIIENNFQEGHKILSRKIQKFENQYRGRELPGFVNYRTFETIVKQQIKALEEPAVDMLHTVTDMVRLAFTDVSIKNFEEFFNLHRTAKSKIEDIRAEQEREGEKLIRLHFQMEQIVYCQDQVYRGALQKVREKELEEEKKKKSWDFGAFQSSSATDSSMEEIFQHLMAYHQEASKRISSHIPLIIQFFMLQTYGQQLQKAMLQLLQDKDTYSWLLKERSDPATSGSS

SEQ ID NO: 702 - protein, 74 aa, Homo sapiens
  SITE (13): Xaa equals any of the naturally occurring L-amino acids
  SITE (36): Xaa equals any of the naturally occurring L-amino acids
EHYSYPCTPTTMXPRSAYWHHITGSQNIAEASSYAXEGYGAAQASSETDLLNRFILLKPKPSQGDSSEAKTPSQ

SEQ ID NO: 703 - protein, 284 aa, Homo sapiens
EAAPWLEAASVCAVTIINPHSAPSPDALVTGASWMSNHVVGGCRLRASVGSSTTVSVGSGHGTLSPSCTWSRVHSHPPSCGERLARPGQARQKVSAKWPRPHPAISQLLFITFVPHLGVCFLHLDTLPGRSSEPNPRLCSVGEGMTSPPPDLPRVLVSLSAGGPLCVFVQFCCMGFVTQKLMLRKASLGPLPRASERPGVPVFLEMGPSAAGCEALRSITGRAWRWWPPGTTLSCLFTFHYQVFSGHYDLFPYNSDLCILLWPAVSAGGSQRGTGRASPCRTAE

SEQ ID NO: 704 - protein, 339 aa, Homo sapiens
  SITE (7): Xaa equals any of the naturally occurring L-amino acids
  SITE (21): Xaa equals any of the naturally occurring L-amino acids
  SITE (24): Xaa equals any of the naturally occurring L-amino acids
  SITE (57): Xaa equals any of the naturally occurring L-amino acids
GRIGVHXPFKWSSFTPPRPSXSWXLVRRSLMAPVQGGVRVIVQPPEDCGSGLQLFQXFTVHRSPVTKIMLSEKHLISVCADNNHVRTWSVTRFRGMISTQPGSTPLASFKILALESADGHGGCSAGNDIGPYGERDDQQVFIQKVVPSASQLFVRLSSTGQRVCSVRSVDGSPTTAFTVLECEGSRRLGSRPRRYLLTGQANGSLAMWDLTTAMDGLGQAPAGGLTEQELMEQLEHCELAPPAPSAPSWGCLPSPSPRISLTSLHSASSNTSLSGHRGSPSPPQAEARRRGGGSFVERCQELVRSGPDLRRPPTPAPWPSSGLGTPLTPPKMKLNETSF

SEQ ID NO: 705 - protein, 104 aa, Homo sapiens
PKFRTIGIVCLKNTYKKTLVNILVMLERKVLLPLRLCAGAYGSKVVYCPFSASPGNDRHYSPIGLPSLYRKTKQAPLAKRYGIWQSEFSVIWKVKELVPVSPFS

SEQ ID NO: 706 - protein, 339 aa, Homo sapiens
  SITE (2): Xaa equals any of the naturally occurring L-amino acids
  SITE (37): Xaa equals any of the naturally occurring L-amino acids
  SITE (173): Xaa equals any of the naturally occurring L-amino acids
  SITE (293): Xaa equals any of the naturally occurring L-amino acids
KXSFLKALLATFGSSFLISACFKLIQDLLSFINPQLXSILIRFISNPMAPSWWGFLVAGLMFLCSMMQSLILQHYYHYIFVTGVKFRTGIMGVIYRKALVITNSVKRASTVGEIVNLMSVDAQRFMDLAPFLNLLWSAPLQIILAIYFLWQNLGPSVLAGVAFMVLLIPLNGXVAVKMRAFQVKQMKLKDSRIKLMSEILNGIKVLKLYAWEPSFLKQVEGIRQGELQLLRTAAYLHTTTTFTWMCSPFLVTLITLWVYVYVDPNNVLDAEKAFVSVSLVNILRLPLNMLPQXISNLTQASVSLKRIQQFLSQEELDPQSVERKTSSQAMHTIHSGTFT

SEQ ID NO: 707 - protein, 117 aa, Homo sapiens
  SITE (1): Xaa equals any of the naturally occurring L-amino acids
  SITE (8): Xaa equals any of the naturally occurring L-amino acids
  SITE (31): Xaa equals any of the naturally occurring L-amino acids
XALGVEEXADFQSLCSWYHGAISRTDAENLXRLCKEASYLVRNSETSKNDFSLSLKSSQGFMHMKLSRTKEHKYVLGQNSPPFSSVPEIVHHYASRKLPIKGAEHMSLLYPVAIRTL

SEQ ID NO: 708 - protein, 199 aa, Homo sapiens
  SITE (66): Xaa equals any of the naturally occurring L-amino acids
WLASQPCMYSLAEWESAPCSARLLGILVGPTLNKSQTLGTVFSPWCSEHLWERLLSVSVQSKFVVXCAIYTVVGWRKVESYTGKKLPSFNFSVTLMRGPQKTSSFPNRITLRRTGLGHLARMAPSCCCPLVRNLHPTSSTPRFSSPQPVPFPGFLNCSILTQRCYLPNTLPTHSCQLCLLFNSPHFVLPSQTCFQSLLL

SEQ ID NO: 709 - protein, 289 aa, Homo sapiens
  SITE (49): Xaa equals any of the naturally occurring L-amino acids
  SITE (86): Xaa equals any of the naturally occurring L-amino acids
RGSRCPGELTSRGEASLSRCFCCWRRCRTAGRKQCGPWSWPTACRSATXPLFVQHDAAQLYLKLWNLIKDQITDVHLVERLQALYXIRVKDSLICVDCAMESSRNSSMLTLPLSLFDVDSKPLKTLEDALHCFFQPRELSSKSKCFCENCGKKTRGKQVLKLTHLPQTLTIHLMRFSIRNSQTRKICHSLYFPQSLDFSQILPMKRESCDAEEQSGGQYELFAVIAHVGMADSGHYCVYIRNAVDGKWFCFNDSNICLVSWEDIQCTYGNPNYHWQETAYLLVYMKMEC

SEQ ID NO: 710 - protein, 244 aa, Homo sapiens
  SITE (189): Xaa equals any of the naturally occurring L-amino acids
  SITE (229): Xaa equals any of the naturally occurring L-amino acids
PIPTKLPLTKAEEKALKRVRRKIKNKISAQESRRKKKEYVECLEKKVETFTSENNELWKKVETLENANRTLLQQLQKLQTLVTNKISRPYKMAATQTGTCLMVAALCFVLVLGSLVPCLPEFSSGSQTVKEDPLAADGVYTASQMPSRSLLFYDDGAGLWEDGRSTLLPMEPPDGWEINPGGPAEQRPXDHLQHDHLDSTHETTKYLSEAWPKDGGNGTSPDFSHSKEXFHDRDLGPNTTIKLS

SEQ ID NO: 711 - protein, 87 aa, Homo sapiens [sequence omitted]

SEQ ID NO: 712 - protein, 533 aa, Homo sapiens
  SITE (16): Xaa equals any of the naturally occurring L-amino acids
  SITE (169): Xaa equals any of the naturally occurring L-amino acids
  SITE (495): Xaa equals any of the naturally occurring L-amino acids
VDPRVRSVFCKKFAEXLGSTEAKAVPYQKFEAHPNDLYVEGLPENIPFRSPSWYGIPRLEKIIQVGNRIKFVIKRPELLTHSTTEVTQPRTNTPVKEDWNVRITKLRKQVEEIFNLKFAQALGLTEAVKVPYPVFESNPEFLYVEGLPEGIPFRSPTWFGIPRLERIVXGSNKIKFVVKKPELVISYLPPGMASKINTKALQSPKRPRSPGSNSKVPEIEVTVEGPNNNNPQTSAVRTPTQTNGSNVPFKPRGREFSFEAWNAKITDLKQKVENLFNEKCGEALGLKQAVKVPFALFESFPEDFYVEGLPEGVPFRRPSTFGIPRLEKILRNKAKIKFIIKKPEMFETAIKESTSSKSPPRKINSSPNVNTTASGVEDLNIIQVTIPDDDNERLSKVEKARQLREQVNDLFSRKFGEAIGMGFPVKVPYRKITINPGCVVVDGMPPGVSFKAPSYLEISSMRRILDSAEFIKFTVIRPFPGLVINNQLVDQSESXGPVIQESAEPSQLEVPATEEIKETDGSSQIKQEPDPTW

SEQ ID NO: 713 - protein, 252 aa, Homo sapiens
NSEYCYSGGADACIHSWKIPDLSMDPYDGYDPSVLSHVLEGHGDAVWGLAFSPTSQRLASCSADGTVRIWDPSSSSPACLCTFPTASEHGVPTSVAFTSTEPAHIVASFRSGDTVLYDMEVGSALLTLESRGSSGPTQINQVVSHPNQPLTITAHDDRGIRFLDNRTGKPVHSMVAHLDAVTCLAVDPNGAFLMSGSHDCSLRLWSLDNKTCVQEITAHRKKHEEAIHAVACHPSKALIASAGADALAKVFV

SEQ ID NO: 714 - protein, 201 aa, Homo sapiens [sequence omitted]

SEQ ID NO: 715 - protein, 287 aa, Homo sapiens
SHHPPAAAHHAESKNGWTLRQEIKITSKFRGKYLSIMPLGTIHCIFHATGHHYTWKKVTTTVHNIIVGKLWIDQSGEIDIVNHKTGDKCNLKFVPYSYFSRDVARKVTGEVTDPSGKVHFALLGTWDEKMECFKVQPVIGENGGDARQRGHEAEESRVMLWKRNPLPKNAENMYYFSELALTLNAWESGTAPTDSRLRPDQRLMENGRWDEANAEKQRLEEKQRLSRKKREAEAMKATEDGTPYDPYKALWFERKKDPVTKELTHIYRGEYWECKEKQDWSSCPDIF

SEQ ID NO: 716 - protein, 203 aa, Homo sapiens
SSYMRGGYFSSSHEGFSYEKDPRLYFDDTCVVPERLEGKVKQEPTMYREGPPYQRRGSLQLWQFLVTLLDDPANAHFIAWTGRGMEFKLIEPEEVARRWGIQKNRPAMNYDKLSRSLRYYYEKGIMQKVAGERYVYKFVCDPDALFSMAFPDNQRPFLKAESECHLSEEDTLPLTHFEDSPAYLLDMDRCSSLPYAEVCLLSF

SEQ ID NO: 717 - protein, 88 aa, Homo sapiens
IIGKEDNSEKPNITKGGLALLEKYTKLVYYNTWLYVGNVTTGQIHLLCSRGSPFLCRKYNTHCMRSLRVDSNPGLSTLDIMHVGRWVW

SEQ ID NO: 718 - protein, 359 aa, Homo sapiens
GLEYPMLHYVGFVPVIDGDFIPADPINLYANAADIDYIAGTNNMDGHIFASIDMPAINKGNKKVTEEDFYKLVSEFTITKGLRGAKTTFDVYTESWAQDPSQENKKKTVVDFETDVLFLVPTEIALAQHRANAKSAKTYAYLFSHPSRMPVYPKWVGADHADDIQYVFGKPFATPTGYRPQDRTVSKAMIAYWTNFAKTGDPNMGDSAVPTHWEPYTTENSGYLEITKKMGSSSMKRSLRTNFLRYWTLTYLALPTVTDQEATPVPPTGDSEATPVPPTGDSETAPVPPTGDSGAPPVPPTGDSGAPPVTPTGDSETAPVPPTGDSGAPPVPPTGDSEAAPVPPTDDSKEAQMPAVIRF

SEQ ID NO: 719 - protein, 134 aa, Homo sapiens
SSPLRPLLLALALASVPCAQGACPASADLKHSDGTRTCAKLYDKSDPYYENCCGGAELSLESGADLPYLPSNWANTASSLVVAPRCELTVWSRQGKAGKTHKFSAGTYPRLEEYRRGILGDWSNAISALYCRCS

SEQ ID NO: 720 - protein, 47 aa, Homo sapiens
KKKKKKKKKKGGRSRGSKLTYACMRRHSSSIVSPKFNSLAVVLQRRD

SEQ ID NO: 721 - protein, 122 aa, Homo sapiens
  SITE (114): Xaa equals any of the naturally occurring L-amino acids
KLFLLKKKKKKKKKKKGGRSRGSKLTYACMRRHSSSIVSPKFNSLAVVLQRRDWENPGVTQLNRLAAHPPFASWRNSEEARTDRPSQQLRSLNGEWDAPCSGALSAAGVVVTRXVTATLASA

SEQ ID NO: 722 - protein, 100 aa, Homo sapiens
STAPTPVMDNSRNAPLAGFGYGLPISRLYAKYFQGDLNLYSLSGYGTDAIIYLKALSSESIEKLPVFNKSAFKHYQMSSEADDWCIPSREPKNLAKEVAM

SEQ ID NO: 723 - protein, 372 aa, Homo sapiens
  SITE (199): Xaa equals any of the naturally occurring L-amino acids
RQHKISETLESRHHKIKTGSPGSEVVTLQQFLEESNKLTSVQIKSSSQENLLDEVMKSLSVSSDFLGKDKPVSCGLARSVSGKTPGDFYDRRTTKPEFLRPGPRKTEDTYFISSAGKPTPGTQGKIKLVKESSLSRQSKDSNPYATLPRASSVISTAEGTTRRTSIHDFLTKDSRLPISVDSPPAAADSNTTAASSEYXLHQWSSHILDIPTHTIGSCAQNDLAIDMPEPLYAQARNSRTGRSHFLNQTFATIRMPSDAFGMLAKDSIGPFTVAHSSQPFLSLNTELVSNISGLPPRPVIRITDQASASLDKPAQKENEQFSDHQNPSNSNLQFSINSNNLVTSACLYPDDTEAALLVSEDNQTVWYEYGCI

SEQ ID NO: 724 - protein, 72 aa, Homo sapiens
  SITE (2): Xaa equals any of the naturally occurring L-amino acids
SXGFNCTQFGSLGKSHFFPIFCHAYLLSLSVLQISNKLLKTQRFGLLFLSLAVRHGVSGRRNRRGNLHGDSY

SEQ ID NO: 725 - protein, 73 aa, Homo sapiens
  SITE (48): Xaa equals any of the naturally occurring L-amino acids
ASINFYFLWVLLKDLNMEKSCHGSELHNALNRRPSIFFTLSTLAAFCXFYQNGLFLGKLFPPFWMGRGFPQWF

SEQ ID NO: 726 - protein, 406 aa, Homo sapiens
  SITE (160): Xaa equals any of the naturally occurring L-amino acids
RFVFSSELHGKSAYSKVTCMPHLMERMVGSGLLWLALVSCILTQASAVQRDPSTVEDKCEKACRPEEECLALNSTWGCFCRQDLNSSDVHSLQPQLDCGPREIKVKVDKCLLGGLGLGEEVIAYLRDPNCSSILQTEERNWVSVTSPVQASACRNILERXQTHAIYKNTLSLVNDFIIRDTILNINFQCAYPLDMKVSLQAALQPIVSSLNVSVDGNGEFIVRMALFQDQNYTNPYEGDAVELSVESVLYVGAILEQGDTSRFNLVLRNCYATPTEDKADLVKYFIIRNSCSNQRDSTIHVEENGQSSESRFSVQMFMFAGHYDLVFLHCEIHLCDSLNEQCQPSCSRSQVRSEVPAIDLARVLDLGPITRRGAQSPGVMNGTPSTAGFLVAWPMVLLTVLLAWLF

SEQ ID NO: 727 - protein, 159 aa, Homo sapiens
  SITE (144): Xaa equals any of the naturally occurring L-amino acids
QHIPYREDKNLTGTARYASINAHLGIEQSRRDDMESLGYVLMYFNRTSLPWQGLKAATKKQKYEKISEKKMSTPVEVLCKGFPAEFAMYLNYCRGLRFEEAPDYMYLRQLFRILFRTLNHQYDYTFDWTMLKQKAAQQAASSSXAGSAGPNPHRFLSMN

SEQ ID NO: 728 - protein, 226 aa, Homo sapiens
  SITE (4): Xaa equals any of the naturally occurring L-amino acids
  SITE (15): Xaa equals any of the naturally occurring L-amino acids
  SITE (108): Xaa equals any of the naturally occurring L-amino acids
EPLXPAGTQRVCLVXPDVKWGPGKSQMTRAEWQVAEAKTLVHTLDGWSVVQTMVVSTKTPDRKLIFGKGNFEHLTEKIRGSPDVTCVFLNVERMAAPTKKELEAAWGXEVFDRFTVVLHIFRCNARTKEARLQVALAEMPLHRSNLKRDVAHLYRGVGSRYIMGSGESFMQLQQRLLREKEAKIRKALDRLRKKRHLLRRQRRRREFPVISVVGYTNLRKDHVIKD

SEQ ID NO: 729 - protein, 61 aa, Homo sapiens
  SITE (39): Xaa equals any of the naturally occurring L-amino acids
  SITE (54): Xaa equals any of the naturally occurring L-amino acids
LCLQGYYRGAVGALLVFDLTKHQTYAVVERWLKELYDHXEATIVVMLVGNKMTXARPGKCP

SEQ ID NO: 730 - protein, 272 aa, Homo sapiens
  SITE (263): Xaa equals any of the naturally occurring L-amino acids
PFHQGFRLLPAAWTPATGSPSQSSIKAWRTPCLSVPGKKKNQWFERQVRWSTATSVTCCSSCTVSMPPSPRSVGWSGKRRLRILPASPSSGSASGWTIRTSTALGISSVITAWGVLFNDSTRLILYNDGDSLQYIERDGTESYLTVSSHPNSLMKKITLLKYFRNYMSEHLLKAGANITPREGDELARLPYLRTWFRTRSAIILHLSNGSVQINFFQDHTKLILCPLMAAVTYIDEKRDFRTYRLSLLEEYGCCKELASRLRXRPHYGGQAA

SEQ ID NO: 731 - protein, 175 aa, Homo sapiens
  SITE (137): Xaa equals any of the naturally occurring L-amino acids
  SITE (167): Xaa equals any of the naturally occurring L-amino acids
  SITE (168): Xaa equals any of the naturally occurring L-amino acids
  SITE (169): Xaa equals any of the naturally occurring L-amino acids
LSCCRRRLCRRRECGVGTGAAAAATPGIFVASSRPFCPAAFPQSALPTPLRPGAPASISRSLSTTHTAPPIMDPGSGGGGGGGGGGGSSSGSSSSDSAPDCWDQADMEAPGPGPCGGGGSLAAAAEAQRENLSAAFXRQLNVNAKPFVPNVHAAEFVPSFLRGPAAXXXPAGGGR

SEQ ID NO: 732 - protein, 133 aa, Homo sapiens
  SITE (81): Xaa equals any of the naturally occurring L-amino acids
  SITE (122): Xaa equals any of the naturally occurring L-amino acids
  SITE (129): Xaa equals any of the naturally occurring L-amino acids
  SITE (130): Xaa equals any of the naturally occurring L-amino acids
TLGPDCSELAAVLLRMDGRLDGWVDGRGWPWMRSALHTQTRWERFVEHDSLQQEYMCAYLCGQKYLHLGFGAIQEEMSQKXLNQGLSTLWILNLKMGAGLCLKALLSHLLGPWFNKALSKLXKKKKKKXXKKR

SEQ ID NO: 733 - protein, 61 aa, Homo sapiens
  SITE (46): Xaa equals any of the naturally occurring L-amino acids
HYNKRSTITSREIQTAVRLLLPGELAKHAVSEGTKAVTQVHPAPKXELPGPGARSLESPAA

SEQ ID NO: 734 - protein, 106 aa, Homo sapiens
  SITE (36): Xaa equals any of the naturally occurring L-amino acids
GSDGPRERAPVAWLSHSILSLILNKYFLWGFFFFLXAVVCFKLTTWKKHLGYLWFSCLVPASTPTPFESGDSFFCVETRWPRQEVKAAIRKALGTLVPVARLQVTS

SEQ ID NO: 735 - protein, 349 aa, Homo sapiens
ARGPGGADSSKPRILLMGLRRSGKSSIQKVVFHKMSPNETLFLESTNKIYKDDISNSSFVNFQIWDFPGQMDFFDPTFDYEMIFRGTGALIYVIDAQDDYMEALTRLHITVSKAYKVNPDMNFEVFIHKVDGLSDDHKIETQRDIHQRANDDLADAGLEKLHLSFYLTSIYDHSIFEAFSKVVQKLIPQLPTLENLLNIFISNSGIEKAFLFDVVSKIYIATDSSPVDMQSYELCCDMIDVVIDVSCIYGLKEDGSGSAYDKESMAIIKLNNTTVLYLKEVTKFLALVCILREESFERKGLIDYNFHCFRKAIHEVFEVGVTSHRSCGHQTSASSLKALTHNGTPRNAI

SEQ ID NO: 736 - protein, 468 aa, Homo sapiens
  SITE (250): Xaa equals any of the naturally occurring L-amino acids
  SITE (301): Xaa equals any of the naturally occurring L-amino acids
  SITE (306): Xaa equals any of the naturally occurring L-amino acids
AACCFSCWASSGFAFVASEPLAFKPLSLLLPHTPLSLTPLFCCPVTCPKLCPELRTFPFLSLEPFFDSTKPSWYPGMTRLLDAEWWRRSEAGHLRRQVAAVLFFPEGTCSNKKALLKFKPGAFIAGVPVQPVLIRYPNSLDTTSWAWRGPGVLKVLWLTASQPCSIVDVEFLPVYHPSPEESRDPTLYANNVQRVMAQALGIPATECEFVGSLPVIVVGRLKVALEPQLWELGKVLRKAGLSAGYVDAGXEPGRSRMISQEEFARQLQLSDPQTVAGAFGYFQQDTKGLVDFRDVALALAXLDGGXSLEELTRLAFELFAEEQAEGPNRLLYKDGFSTILHLLLGSPHPAATALHAELCQAGSSQGLSLCQFQNFSLHDPLYGKLFSTYLRPPHTSRGTSQTPNASSPGNPTALANGTGKHPSRRETECLSLSPPPPQGSARGLPYASAPSLLLFEFCYCCLVVVFLS

SEQ ID NO: 737 - protein, 184 aa, Homo sapiens
  SITE (24): Xaa equals any of the naturally occurring L-amino acids
RESPFPLPSGREERRGQGKKLLVXLTMKTLLLLLLVLLELGEAQGSLHRVPLRRHPSLKKKLRARSQLSEFWKSHNLDMIQFTESCSMDQSAKEPLINYLDMEYFGTISIGSPPQNFTVIFDTGSSNLWVPSVYCTSPACKTHSRFQPSQSSTYSQPGQSFSIQYGTGSLSGIIGSRPSLCGKD

SEQ ID NO: 738 - protein, 624 aa, Homo sapiens
  SITE (2): Xaa equals any of the naturally occurring L-amino acids
  SITE (188): Xaa equals any of the naturally occurring L-amino acids
  SITE (192): Xaa equals any of the naturally occurring L-amino acids
HXHSFSSGYVEMEFEFDRLRAFQAMQVHCNNMHTLGARLPGGVECRFRRGPAMAWEGEPMRHNLGGNLGDPRARAVSVPLGGRVARFLQCRFLFAGPWLLFSEISFISDVVNNSSPALGGTFPPAPWWPPGPPPTNFSSLELEPRGQQPVAKAEGSPTAILIGCLVAIILLLLLIIALMLWRLHWRRXLSKXERRVLEEELTVHLSVPGDTILINNRPGPREPPPYQEPRPRGNPPHSAPCVPNGSALLLSNPAYRLLLATYARPPRGPGPPTPAWAKPTNTQAYSGDYMEPEKPGAPLLPPPPQNSVPHYAEADIVTLQGVTGGNTYAVPALPPGAVGDGPPRVDFPRSRLRFKEKLGEGQFGEVHLCEVDSPQDLVSLDFPLNVRKGHPLLVAVKILRPDATKNARNDFLKEVKIMSRLKDPNIIRLLGVCVQDDPLCMITDYMENGDLNQFLSAHQLEDKAAEGAPGDGQAAQGPTISYPMLLHVAAQIASGMRYLATLNFVHRDLATRNCLVGENFTIKIADFGMSRNLYAGDYYRVQGRAVLPIRWMAWECILMGKFTTASDVWAFGVTLWEVLMLCRAQPFGQLTDEQVIENAGEFFRDQGRQVYLSRPPACPQAYMS

SEQ ID NO: 739 - protein, 477 aa, Homo sapiens
FGTSWCSMMLPPWTLGLLLLATVRGKEVCYGQLGCFSDEKPWAGTLQRPVKLLPWSPEDIDTRFLLYTNENPNNFQLITGTEPDTIEASNFQLDRKTRFIIHGFLDKAEDSWPSDMCKKMFEVEKVNCICVDWRHGSRAMYTQAVQNIRVVGAETAFLIQALSTQLGYSLEDVHVIGHSLGAHTAAEAGRRLGGRVGRITGLDPAGPCFQDEPEEVRLDPSDAVFVDVIHTDSSPIVPSLGFGMSQKVGHLDFFPNGGKEMPGCKKNVLSTITDIDGIWEGIGGFVSCNHLRSFEYYSSSVLNPDGFLGYPCASYDEFQESKCFPCPAEGCPKMGHYADQFKGKTSAVEQTFFLNTGESGNFTSWRYKVSVTLSGKEKVNGYIRIALYGSNENSKQYEIFKGSLKPDASHTCAIDVDFNVGKIQKVKFLWNKRGINLSEPKLGASQITVQSGEDGTEYNFCSSDTVEENVLQSLYPC

SEQ ID NO: 740 - protein, 303 aa, Homo sapiens
DFRTAPGRRGRRRRTERPGRGGPALGSQDSRGSRVRRAAAGLSHCSPPARLPSGAMAGSSSLEAVRRKIRSLQEQADAAEERAGTLQRELDHERKLRETAEADVASLNRRIQLVEEELDRAQERLATALQKLEEAEKAADESERGMKVIESRAQKDEEKMEIQEIQLKEAKHIAEDADRKYEEVARKLVIIESDLERAEERAELSEGQVRQLEEQLRIMDQTLKALMAAEDKYSQKEDRYEEEIKVLSDKLKEAETRAEFAERSVTKLEKSIDDLEEKVAHAKEENLSMHQMLDQTLLELNNM

SEQ ID NO: 741 - protein, 363 aa, Homo sapiens
  SITE (2): Xaa equals any of the naturally occurring L-amino acids
  SITE (144): Xaa equals any of the naturally occurring L-amino acids
  SITE (340): Xaa equals any of the naturally occurring L-amino acids
  SITE (344): Xaa equals any of the naturally occurring L-amino acids
HXPRLPALPPRLLSPSAATMSASAVFILDVKGKPLISRNYKGDVAMSKIEHFMPLLVQREEEGALAPLLSHGQVHFLWIKHSNLYLVATTSKNANASLVYSFLYKTIEVFCEYFKELEEESIRDNFVIVYELLDELMDFGFPQXTDSKILQEYITQQSNKLETGKSRVPPTVTNAVSWRSEGIKYKKNEVFIDVIESVNLLVNANGSVLLSEIVGTIKLKVFLSGMPELRLGLNDRVLFELTGRSKNKSVELEDVKFHQCVRLSRFDNDRTISFIPPDGDFELMSYRLSTQVKPLIWIESVIEKFSHSRVEIMVKAKGQFKKQSVANGVEISVPVPSDAXSPRXKTSVGSAKLCAGEKRRDLE

SEQ ID NO: 742 - protein, 65 aa, Homo sapiens [sequence omitted]

SEQ ID NO: 743 - protein, 95 aa, Homo sapiens
  SITE (4): Xaa equals any of the naturally occurring L-amino acids
TEKXIKISGFFLGYHYCLISLCQVYRTCHTFMISSTEKLLIQISPGHVRQNIAGWDFKVSDDAFPPSTDPPAPLAGHGEAESHLTIQKYMTTSPL

SEQ ID NO: 744 - protein, 237 aa, Homo sapiens
  SITE (207): Xaa equals any of the naturally occurring L-amino acids
RGGRARGGQGPRLNICGICGKSFGRGSTLIQHQRIHTGEKPYKCEVCSKAFSQSSDLIKHQRTHTGERPYKCPRCGKAFADSSYLLRHQRTHSGQKPYKCPHCGKAFGDSSYLLRHQRTHSHERPYSCTECGKCYSQNSSLRSIRGCTPVRGPSAVASAARASPSGRPLSPMPAATPGRSPSSALSAASALARARCWPSTPAPTCQXAPTAAPTAARPSIAPPLSSSTSAPTRASGP

SEQ ID NO: 745 - protein, 267 aa, Homo sapiens
  SITE (191): Xaa equals any of the naturally occurring L-amino acids
DTSVTMWFLVLCLALSLGGTGAAPPIQSRIVGGWECEQHSQPWQAALYHFSTFQCGGILVHRQWVLTAAHCISDNYQLWLGRHNLFDDENTAQFVHVSESFPHPGFNMSLLENHTRQADEDYSHDLMLLRLTEPADTITDAVKVVELPTQEPEVGSTCLASGWGSIEPENFSFPDDLQCVDLKILPNDECXKAHVQKVTDFMLCVGHLEGGKDTCVGDSGGPLMCDGVLQGVTSWGYVPCGTPNKPSVAVRVLSYVKWIEDTIAENS

SEQ ID NO: 746 - protein, 169 aa, Homo sapiens
RLRSGPWISSKMAARSVSGITRRVFMWTVSGTPCREFWSRFRKEKEPVVVETVEEKKEPILVCPPLRSRAYTPPEDLQSRLESYVKEVFGSSLPSNWQDISLEDSRLKFNLLAHLADDLGHVVPNSRLHQMCRVRDVLDFYNVPIQDRSKFDELSASNLPPNLKITWSY

SEQ ID NO: 747 - protein, 414 aa, Homo sapiens
  SITE (14): Xaa equals any of the naturally occurring L-amino acids
CLVNLPPTQTQAVXRPSTLLPNYVLKPFFPNLFPPPESWFGSWLPICLLLLTWVNCSSVRWATRVQDIFTAGKLLALALIIIMGIVQICKGEYFWLEPKNAFENFQEPDIGLVALAFLQGSFAYGGWNFLNYVTEELVDPYKNLPRAIFISIPLVTFVYVFANVAYVTAMSPQELLASNAVAVTFGEKLLGVMAWIMPISVALSTFGGVNGSLFTSSRLFFAGAREGHLPSVLAMIHVKRCTPIPALLFTCISTLLMLVTSDMYTLINYVGFINYLFYGVTVAGQIVLRWKKPDIPRPIKINLLFPIIYLLFWAFLLVFSLWSEPVVCGIGLAIMLTGVPVYFLGVYWQHKPKCFSDFIELLTLVSQKMCVVVYPEVERGSGTEEANEDMEEQQQPMYQPTPTKDKDVAGQPQP

SEQ ID NO: 748 - protein, 78 aa, Homo sapiens
HLSQEHLSKSIYPKSIYPDDFSIYPKSIYPKDSIYPKSIYPRAFFPRLFIPKILAFIPRAFTQEHLSQGILFCFVLFF

SEQ ID NO: 749 - protein, 93 aa, Homo sapiens
MCGCSRHFSVVVCSHFGPTPASLATLQLCSDFCVYAWCASLAAFSSMQPGVDVGKRDAFLLWKLSGKLVSISPPLPGLPCTPKDFVQMGSSIF

SEQ ID NO: 750 - protein, 91 aa, Homo sapiens
  SITE (31): Xaa equals any of the naturally occurring L-amino acids
LCFWHITVLCHYYKVKHLQRRMSLKMRDLLXINMPMRAYLISLYNMQPNQTFTPAEKCCPGEKEIYKDRLSPFFCCSTKHSKKLESFTLEI

SEQ ID NO: 751 - protein, 94 aa, Homo sapiens
VRCSFQLTSGRRTSAMKVTGIFLLSALALLSLSGNTGADSLGREAKCYNELNGCTKIYDPVCGTDGNTYPNECVLCFENRKRQTSILIQKSGPC

SEQ ID NO: 752 - protein, 78 aa, Homo sapiens
  SITE (72): Xaa equals any of the naturally occurring L-amino acids
VRGAGVLEPQTAQEAPGRCRGALWWVPPTKREGLVCPSPSGTTQPSAALSQTFLPCPAELVYQEVILQPERXVLWKRQ

SEQ ID NO: 753 - protein, 174 aa, Homo sapiens
ARDSLPLSMAQTNSFFMLISSLMFLSLSQGQESQTELPNPRISCPEGTNAYRSYCYYFNEDPETWVDADLYCQNMNSGNLVSVLTQAEGAFVASLIKESSTDDSNVWIGLHDPKKNRRWHWSSGSLVSYKSWDTGSPSSANAGYCASLTSCSGFKKWKDESCEKKFSFVCKFKN

SEQ ID NO: 754 - protein, 85 aa, Homo sapiens
CRPRSGIPGEEEEEEEDSQAEVLKVIRQSAGQKTTCGQGLEGPWERPPPLDESERDGGSEDQVEDPALSEPGEEPQRPSPSEPGT

SEQ ID NO: 755 - protein, 121 aa, Homo sapiens
GRVGEQTVPYGLSNYRGSFRGKRSAGPLPGNLQLSHRPHLRCACVGRYDKACLHFCTQTLDVSSNSRTAEKTDKEEEGKVEVKDQQSKQALDLHHPKLMPGSGLALAPSTCPRCLFQEGAP

SEQ ID NO: 756 - protein, 39 aa, Homo sapiens
GFSCLSLLSSCDYRHAPPCLANFIFFSRDRISPCWSGWS

SEQ ID NO: 757 - protein, 63 aa, Homo sapiens
  SITE (56): Xaa equals any of the naturally occurring L-amino acids
TSSTINCSLGTFYAQNCAPSSEQQVFNGPCDEKGPIKAAGMGHSPTPHGPGHCHSXCPASPGL

SEQ ID NO: 758 - protein, 65 aa, Homo sapiens
LLDCFCDTDTSPLSEHPLPLDSVHRKLVAPLNTLFLPCNTASDFEPKNKDYSSQTPSQINFVTKL

SEQ ID NO: 759 - protein, 101 aa, Homo sapiens
  SITE (20): Xaa equals any of the naturally occurring L-amino acids
  SITE (49): Xaa equals any of the naturally occurring L-amino acids
HPASNLGDFRRCLNPDLSVXWPHCEPRNATPWKPHTLLSPSVLIPVLLXVSPSWLFLESLSFPHFPLPAAVLSPVALDLHSWSNTLNSNTSVFLPHPLDKS

SEQ ID NO: 760 - protein, 61 aa, Homo sapiens
  SITE (35): Xaa equals any of the naturally occurring L-amino acids
  SITE (41): Xaa equals any of the naturally occurring L-amino acids
  SITE (61): Xaa equals any of the naturally occurring L-amino acids
IRIAALDDFRTSLTMSSTRSQNPHGLKQIGLDQIXGRPQSXASSRCYTRAEHGPSSRYMEX

SEQ ID NO: 761 - protein, 255 aa, Homo sapiens
  SITE (186): Xaa equals any of the naturally occurring L-amino acids
  SITE (195): Xaa equals any of the naturally occurring L-amino acids
  SITE (209): Xaa equals any of the naturally occurring L-amino acids
LTPSGFRSGRSVPTMGLELYLDLLSQPCRAVYIFAKKNDIPFELRIVDLIKGQHLSDAFAQVNPLKKVPALKDGDFTLTESVAILLYLTRKYKVPDYWYPQDLQARARVDEYLAWQHTTLRRSCLRALWHKVMFPVFLGEPVSPQTLAATLAELDVTLQLLEDKFLQNKAFLTGPHISLADLVAIXELMHPVGAXLPSLRRPTQAGHMXAGVEAAVGEDLFQEAHEVILKAKDDFPPADPTIKQKLMPWVLAMIR

SEQ ID NO: 762 - protein, 85 aa, Homo sapiens
  SITE (41): Xaa equals any of the naturally occurring L-amino acids
DEYLAWQHTTLRRSCLRALWHPVGAGCQVFEGRPKLATWRXRVEAAVGEDLFQEAHEVILKAKDFPPADPTIKQKLMPWVLAMIR

SEQ ID NO: 763 - protein, 136 aa, Homo sapiens
  SITE (3): Xaa equals any of the naturally occurring L-amino acids
HEXREHAGPKMAASRYRRFLKLCEEWPVDETKRGRDLGAYLRQRVAQAFREGENTQVAEPEACDQMYESLARLHSNYYKHKYPRPRDTSFSGLSLEEYKLILSTDTLEELKEIDKGMWKKLQEKFAPKGPEEDHKA

SEQ ID NO: 764 - protein, 302 aa, Homo sapiens
PGLHPGNRGLRILLTLPPNWPQYIHSLRKKNKVPTAKKRNRIKRYVAAGRASMNSMTSAVPVANSVLVVAPHNGYPVTPGIMSHVPLYPNSQPQVHLVPGNPPSLVSNVNGQPVQKALKEGKTLGAIQIIIGLAHIGLGSIMATVLVGEYLSISFYGGFPFWGGLWFIISGSLSVAAENQPYSYCLLSGSLGLNIVSAICSAVGVILFITDLSIPHPYAYPDYYPYAWGVNPGMAISGVLLVFCLLEFGIACASSHFGCQLVCCQSSNVSVIYPNIYAANPVITPEPVTSPPSYSSEIQANK

SEQ ID NO: 765 - protein, 141 aa, Homo sapiens
  SITE (131): Xaa equals any of the naturally occurring L-amino acids
  SITE (137): Xaa equals any of the naturally occurring L-amino acids
KMFRKGKKRHSSSSSQSSEISTKSKSVDSSLGGLSRSSTVASLDTDSTKSSGQSNNNSDTCAEFRIKYVGAIEKLKLSEGKGLEGPLDLINYIDVAQQDGKLPFVPPEEEFIMGVSKYGIKVFNIRSICKXYNLLRXLCFR

SEQ ID NO: 766 - protein, 55 aa, Homo sapiens
  SITE (21): Xaa equals any of the naturally occurring L-amino acids
  SITE (22): Xaa equals any of the naturally occurring L-amino acids
  SITE (23): Xaa equals any of the naturally occurring L-amino acids
NLCNFLYLLLFHQRNLKSFFXXXKKKKKKKKKKKKKKKKKKKKKKKKKKKKGGRF

SEQ ID NO: 767 - protein, 115 aa, Homo sapiens
  SITE (18): Xaa equals any of the naturally occurring L-amino acids
TLNTYLSFNVHINKAPIXWSLEKKKSFHVVPRSRSRSSSQFESRSRSSSRERSRSRGSKSRSSSRSTGALLPHEKDLIQVHHLLLRGTEREVVLDLLHLVIAKKDEQDHGHPKAR

SEQ ID NO: 768 - protein, 303 aa, Homo sapiens
  SITE (257): Xaa equals any of the naturally occurring L-amino acids
VNEIMILEGGGVMNLNPGNNLLHQPPAWTDSYSTCNVSSGFFGGQWHEIHPQYWTKYQVWEWLQHLLDTNQLDANCIPFQEFDINGEHLCSMSLQEFTRAAGTAGQLLYSNLQHLKWNGQCSSDLFQSTHNVIVKTEQTEPSIMNTWKDENYLYDTNYGSTVDLLDSKTFCRAQISMTTTSHLPVESPDMKKEQDPPAKCHTKKHNPRGTHLWEFIRDILLNPDKNPGLIKWEDRSEGVFRFLKSEAVAQLWGKKKXNSSMTYEKLSRAMRYYYKREILERVDGRRLVYKFGKNARGWRENEN

SEQ ID NO: 769 - protein, 95 aa, Homo sapiens
NMYGTSCLILHVTSLLYIDEVLVTLSSNTLPLLFRECLRDFLYWFYYSDYGLDLSILLLPPGFLIIHPSKLIFCEAFVSQIKTLLEPKVVADGYL

SEQ ID NO: 770 - protein, 247 aa, Homo sapiens
  SITE (131): Xaa equals any of the naturally occurring L-amino acids
GSRSRAAAREQLPKSVPCGAGAGRGFAEAPRHSEEVRERRQTTGDPGPAARAEPSVPACVPACPRGCVFAGVCCVHRCFCGRRHVRTGWGCPSEPMRHKACRRLFGPVDSEQLSRDCDALMAGCIQEAREXWNFDFVTETPLEGDFAWERVRGLGLPKLYLPTGPRRGRDELGGGRRPGTSPALLQGTAEEDHVDLSLSCTLVPRSGEQAEGSPGGPGDSQGRKRRQTSMTDFYHSKRRLIFSKRKP

SEQ ID NO: 771 - protein, 81 aa, Homo sapiens
CICLSCATGASNQHIHQHPSGGVHGRVPSLFLLHFSFFSFLLKLLFNSAKGSFFFAFLNLNFFNLHFLVLIFLYILLAMSF

SEQ ID NO: 772 - protein, 281 aa, Homo sapiens
SVRSNSGSTTRPLSPPIPRTSNKVPVVQPSHAVHPLTPLITYSDEHFSPGSHPSHIPSDVNSKQGMSRHPPAPDIPTFYPLSPGGVGQITPPLGWQGQPVYPITGGFRQPYPSSLSVDTSMSRFSHHMIPGPPGPHTTGIPHPAIVTPQVKQEHPHTDSDLMHVKPQHEQRKEQEPKRPHIKKPLNAFMLYMKEMRANVVAECTLKESAAINQILGRRWHALSREEQAKYYELARKERQLHMQLYPGWSARDNYGKKKKRKREKLQESASGTGPRMTAAYI

SEQ ID NO: 773 - protein, 195 aa, Homo sapiens
KIPFLGVCLGMQLAVIEFARNCLNLKDADSTEFRPNAPVPLVIDMPEHNPGNLGGTMRLGIRRTVFKTENSILRKLYGDVPFIEERHRHRFEVNPNLIKQFEQNDLSFVGQDVDGDRMEIIELANHPYFVGVQFHPEFSSRPMKPSPPYLGLLLAATGNLNAYLQQGCKLSSSDRYSDASDDSFSEPRIAELEIS

SEQ ID NO: 774 - protein, 90 aa, Homo sapiens
  SITE (77): Xaa equals any of the naturally occurring L-amino acids
EKGPSVSVKPKAGFCLAGLRSGTHSWTNHDIPDGVTWPTCRKGVGSVPEDRRGGVQIGQEVMASQAPNCCNPGGQPXVETTGFRAVPLPS

SEQ ID NO: 775 - protein, 205 aa, Homo sapiens
  SITE (12): Xaa equals any of the naturally occurring L-amino acids
  SITE (110): Xaa equals any of the naturally occurring L-amino acids
  SITE (131): Xaa equals any of the naturally occurring L-amino acids
  SITE (138): Xaa equals any of the naturally occurring L-amino acids
  SITE (141): Xaa equals any of the naturally occurring L-amino acids
SCRSTLVDPKKXGTREWQQVDRQLPSLACKYPVSSREATQILSVPKVDDEILGFISEATPLGGIQAASTESCNQQLDLALCRAYEAAASALQIATHTAFVAKAMQADISXAAQILSSDPSRTHQALGILSXTYDAASXICXAAFDEVKMAAHTMGNATVGRRYLWLKDCKINLASKNKLASTPFKGGTLFGGEVCKVIKKRGNKH

SEQ ID NO: 776 - protein, 99 aa, Homo sapiens
  SITE (7): Xaa equals any of the naturally occurring L-amino acids
FSTRPIXLTLMLMAVLNCLFDSLSQMLRKNVEKRALLENMEGLFLAVDEIVDGGVILESDPQQVVHRVALRGEDVPLTEQTVSQVLQSAKEQIKWSLLR

SEQ ID NO: 777 - protein, 211 aa, Homo sapiens
  SITE (10): Xaa equals any of the naturally occurring L-amino acids
  SITE (137): Xaa equals any of the naturally occurring L-amino acids
LGDTIEGTPXGTGSGIPGSTHASREEKSKQFLDLMETIDKQREEMAKSSRASAARVGKLQEALNERHSIINALKAKLQMTEAALALSEQKAQDLGELLATAEQEQLSLSQRQAKELKLEQQEAAERESKLLRDLSAXNEKNLLLQNQVDELERKFRCQQEQLFQTRQEMTSMSAELKMRAIQARSAWTWRREDADRAWRTPKACASRRWSI

SEQ ID NO: 778 - protein, 181 aa, Homo sapiens
  SITE (145): Xaa equals any of the naturally occurring L-amino acids
  SITE (155): Xaa equals any of the naturally occurring L-amino acids
  SITE (163): Xaa equals any of the naturally occurring L-amino acids
  SITE (169): Xaa equals any of the naturally occurring L-amino acids
GRGGAGRGVPLVGSGPRILSAGSRRPRSCAPPPGPGLGRVPRVLGSFCPPVLQRSRFQPGCPRMGEFNEKKTTCGTVCLKYLLFTYNCCFWLAGLAVMAVGIWTLALKSDYISLLASGTYLATAYILVVAGTVVMVTGVLGCCAXFKERRNLLRXYFILLLIXFLAGDXRWYPRLRLITSS

SEQ ID NO: 779 - protein, 132 aa, Homo sapiens
  SITE (6): Xaa equals any of the naturally occurring L-amino acids
SRAKRXPKSKELVSSSSSGSDSDSEVDKKLKRKKQVAPEKPVKKQKTGETSRALSSSKQSSSSRDDNMFQIGKMRYVSVRDFKGKVLIDIREYWMDPEGEMKPGRKGISLNPEQWSQLKEQISDIDDAVRKL

SEQ ID NO: 780 - protein, 370 aa, Homo sapiens
  SITE (39): Xaa equals any of the naturally occurring L-amino acids
  SITE (56): Xaa equals any of the naturally occurring L-amino acids
DNKKYEIIKRDILRGKSVPHYAAIEPDGNGLMIVSYKSXTFVQAGQDLEENMDEDXSEKIKEPLYYWQQTEDDLTVTIRLPEDSTKEDIQIQFLPDHINIVLKDHQFLEGKLYSSIDHESSTWIIKESNSLEISLIKKNEGLTWPELVIGDKQGELIRDSAQCAAIAERLMHLTSEELNPNPDKEKPPCNAQELEECDIFFEESSSLCRFDGNTLKTTHVVNLGSNQYLFSVIVDPKEMPCFCLRHDVDALLWQPHSSKQDDMWEHIATFNALGYVQASKRDKKFFACAPNYSYAALCECLRRVFIYRQPAPMSTVLYNRKEGRQVGQVAKQQVASLETNDPILGFQATNERLFVLTTKNLFLIKVNTEN

SEQ ID NO: 781 - protein, 259 aa, Homo sapiens
  SITE (215): Xaa equals any of the naturally occurring L-amino acids
  SITE (227): Xaa equals any of the naturally occurring L-amino acids
  SITE (228): Xaa equals any of the naturally occurring L-amino acids
  SITE (247): Xaa equals any of the naturally occurring L-amino acids
  SITE (251): Xaa equals any of the naturally occurring L-amino acids
  SITE (257): Xaa equals any of the naturally occurring L-amino acids
  SITE (259): Xaa equals any of the naturally occurring L-amino acids
GGDPGGGGRSPALRQKVPRLHTRARSQRAAGADGRRGGRRQGRSVYSCSGAVSWRRLGRLLSPGSAAAAKAAAPALSLSLSRLWLQVKGKQARMDIYDTQTLGVVVFGGFMVVSAIGIFLVSTFSMKETSYEEALANQRKEMAKTHHQKVEKKKKEKTVEKKGKTKKKEEKPNGKIPDHDPAPNVTVLLREPVRAPAVAVAPTPVQPPIIVAPVXTVPAMPQEKLAXXPKDKKKKEKKVAKVGPVSXCSDXIQVSIXKX

SEQ ID NO: 782 - protein, 177 aa, Homo sapiens
GSPVEPRGSAPEIMLNSKGYTKSIDIWSVGCILAEMLSNRPIFPGKHYLDQLNHILGILGSPSQEDLNCIINMKARNYLQSLPSKTKVAWAKLFPKSDSKALDLLDRMLTFNPNKRITVEEALAHPYLEQYYDPTDEPVAEEPFTFAMELDDLPKERLKELIFQETARFQPGVLEAP

SEQ ID NO: 783 - protein, 154 aa, Homo sapiens
  SITE (153): Xaa equals any of the naturally occurring L-amino acids
HLYAFFIQWSPEIYAEDTGEYTREPGFIVVKKIEESETIEDSSNQAAAREWEITTREDINSKQVATVKADLESESFRPNLSDPSELLLPDQIEKLTKHLPPRTIGYPWTLVYGTGKHGTSLKTLYRTMTGLDTPVLMVIKDSDGQVFGALHLXH

SEQ ID NO: 784 - protein, 164 aa, Homo sapiens
  SITE (48): Xaa equals any of the naturally occurring L-amino acids
  SITE (118): Xaa equals any of the naturally occurring L-amino acids
  SITE (130): Xaa equals any of the naturally occurring L-amino acids
FLYSFARQTMAPFGRNLLKTRHKNRSPTKDMDSEEKEIVVWVCQEEKXVCGLTKRTTSADVIQALLEEHEATFGEKRFLLGKPSDYCIIEKWRGSERVLPPLTRILKLWKAWGDEQPXMQFVLVKADAFXPVPLWRTAEAKLVQNTEKLWELSPANLHEDFTTR

SEQ ID NO: 785 - protein, 72 aa, Homo sapiens
  SITE (68): Xaa equals any of the naturally occurring L-amino acids
  SITE (72): Xaa equals any of the naturally occurring L-amino acids
GYRLSCEVISIWKQVWGAGGALVRVLGGSGVSVGGSTGYTGARKEHGVTCSVGVRLGVQVEEPGVLGXQSVX

SEQ ID NO: 786 - protein, 332 aa, Homo sapiens
  SITE (37): Xaa equals any of the naturally occurring L-amino acids
  SITE (298): Xaa equals any of the naturally occurring L-amino acids
  SITE (303): Xaa equals any of the naturally occurring L-amino acids
  SITE (323): Xaa equals any of the naturally occurring L-amino acids
GKQREGRREGIRQLQFSSLGAPTPRCPASCPQPGHAXPTLPAPQNPRHPPEPPQSWPRRMGALRPTLLPPSLPLLLLLMLGMGCWAREVLVPEGPLYRVAGTAVSISCNVTGYEGPAQQNFEWFLYRPEAPDTALGIVSTKDTQFSYAVFKSRVVAGEVQVQRLQGDAVVLKIARLQAQDAGIYECHTPSTDTRYLGSYSGKVELRVLPDVLQVSAAPPGPRGRQAPTSPPRMTVHEGQELALGCLARTSTQKHTHLAVSFGRSVPEAPVGRSTLQEVVGIRSDLAVEAGAPYAERLXAGELXLGKEGTDRYRMVVGGAQAGXRRHLPLHCR

SEQ ID NO: 787 - protein, 576 aa, Homo sapiens
EKETAQLREQVGRMERELNHEKERCDQLQAEQKGLTEVTQSLKMENEEFKKRFSDATSKAHQLEEDIVSVTHKAIEKETELDSLKDKLKKAQHEREQLECQLKTEKDEKELYKVHLKNTEIENTKLMSEVQTLKNLDGNKESVITHFKEEIGRLQLCLAEKENLQRTFLLTTSSKEDTCFLKEQLRKAEEQVQATRQEVVFLAKELSDAVNVRDRTMADLHTARLENEKVKKQLADAVAELKLNAMKKDQDKTDTLEHELRREVEDLKLRLQMAADHYKEKFKECQRLQKQINKLSDQSANNNNVFTKKTGNQQKVNDASVNTDPATSASTVDVKPSPSAAEADFDIVTKGQVCEMTKEIADKTEKYNKCKQLLQDEKAKCNKYADELAKMELKWKEQVKIAENVKLELAEVQDNYKELKRSLENPAERKMEDGADGAFYPDEIQRPPVRVPSWGLEDNVVCSQPARNFSRPDGLEDSEDSKEDENVPTAPDPPSQHLRGHGTGFCFDSSFDVHKKCPLCELMFPPNYDQSKFEEHVESHWKVCPMCSEQFPPDYDQQVFERHVQTHFDQNVLNFD

SEQ ID NO: 788 - protein, 311 aa, Homo sapiens
  SITE (135): Xaa equals any of the naturally occurring L-amino acids
  SITE (175): Xaa equals any of the naturally occurring L-amino acids
AIVPSWDLDKDTISLLSPVLCIFPSPSSQTSLLYVFSLAGRMTQNTVIVNGVAMASRPSQPTHVNVHIHQESALTQLLKAGGSLKKFLFHPGDTVPSTARIGYEQLALGVTQILLGVVSCVLGVCLSLGPWTVLXASGCAFWAGSVVIAAGAGAIVHEKHPGKLAGYISSLLTLXGFATAMAAVVLCVNSFIWQTEPFLYIDTVCDRSDPVFPTTGYRWMRRSQENQWQKEECRAYMQMLRKLFTAIRALFLAVCVLKVIVSLVSLGVGLRNLCGQSSQPLNEEGSEKRLLGENSVPPSPSREQTSTAIVL

SEQ ID NO: 789 - protein, 76 aa, Homo sapiens
HSKSFVLFKICFGNYHIFFSYLPLNGHSVYCWNVPSKRCSFRSTVIAPGSMRYCLYYEVGVLSTEIILLNKYVCSV

SEQ ID NO: 790 - protein, 106 aa, Homo sapiens [sequence omitted]

SEQ ID NO: 791 - protein, 121 aa, Homo sapiens
  SITE (12): Xaa equals any of the naturally occurring L-amino acids
SEKSTEHPEKTXATTEKTTRTPEKPTLYSEKTICTKGKNTPVPEKPTENLGNTTLTTETIKAPVKSTENPEKTAAVTKTIKPSVKVTGDKSLTTTSSHLNKTEVTHQVPTGSFTLITSRTS

SEQ ID NO: 792 - protein, 128 aa, Homo sapiens
QTATFQGATTVGGSKERKEKRRQRKGEECSLPGLTCFTHDNNHWQTAPFWNLGSFCACTSSNNNTYWCLRTVNETHNFLFCEFATGFLEYFDMNTDPYQLTNTVHTVERGILNQLHVQLMGAQKLSRV

SEQ ID NO: 793 - protein, 190 aa, Homo sapiens
  SITE (3): Xaa equals any of the naturally occurring L-amino acids
DPXVRSQKKKKKMSSWPYFQPFDSLSTSLVLVCLCQRHVRHLQRDALSQLMNGPIRKKLKIIPEDQSWGGQATNVFVNMEEDFMKPVISIVDELLEAGINVTVYNGQLDLIVDTMGQEAWVRKLKWPELPKFSQLKWKALYSDPKSLETSAFVKSYKNLAFYWILKAGHMVPSDQGDMALKMMRLVTQQE

SEQ ID NO: 794 - protein, 260 aa, Homo sapiens
  SITE (106): Xaa equals any of the naturally occurring L-amino acids
NHSCWQGPQLMPASSPFLLAPKGPPGNMGGPVREPALSVALWLSWGAALGAVACAMALLTQQTELQSLRREVSRLQGTGGPSQNGEGYPWQSLPEQSSDALEAWEXGERSRKRRAVLTQKQKKQHSVLHLVPINATSKDDSDVTEVMWQPALRRGRGLQAQGYGVRIQDAGVYLLYSQVLFQDVTFTMGQVVSREGQGRQETLFRCIRSMPSHPDRAYNSCYSAGVFHLHQGDILSVIIPRARAKLNLSPHGTFLGFVKL

SEQ ID NO: 795 - protein, 310 aa, Homo sapiens
  SITE (72): Xaa equals any of the naturally occurring L-amino acids
GTRLRVALEAQSPRRRAGWCSCAGGVLRLGVVTGSRMASDSGNQGTLCTLEFAVQMTCQSCVDAVRKSLQGXAGVQDVEVHLEDQMVLVHTTLPSQEVQALLEGTGRQAVLKGMGSGQLQNLGAAVAILGGPGTVQGVVRFLQLTPERCLIEGTIDGLEPGLHGLHVHQYGDLTNNCNSCGNHFNPDGASHGGPQDSDRHRGDLGNVRADADGRAIFRMEDEQLKVWDVIGRSLIIDEGEDDLGRGGHPLSKITGNSGERLACGIIARSAGLFQNPKQICSCDGLTIWEERGRPIAGKGRKESAQPPAHL

SEQ ID NO: 796 - protein, 465 aa, Homo sapiens
  SITE (59): Xaa equals any of the naturally occurring L-amino acids
AGEKLLKDCVLLHLPCARSPPVSHSVTMVQWKRLCQLHYLWALGCYMLLATVALKLSFXLKCDSDHLGLESRESQSQYCRNILYNFLKLPAKRSINCSGVTRGDQEAVLQAILNNLEVKKKREPFTDTHYLSLTRDCEHFKAERKFIQFPLSKEEVEFPIAYSMVIHEKIENFERLLRAVYAPQNIYCVHVDEKSPETFKEAVKAIISCFPNVFIASKLVRVVYASWSRVQADLNCMEDLLQSSVPWKYFLNTCGTDFPIKSNAEMVQALKMLNGRNSMESEVPPKHKETRWKYHFEVVRDTLHLTNKKKDPPPYNLTMFTGNAYIVASRDFVQHVLKNPKSQQLIEWVKDTYSPDEHLWATLQRARWMPGSVPNHPKYDISDMTSIARLVKWQGHEGDIDKGAPYAPCSGIHQRAICVYGAGDLNWMLQNHHLLANKFDPKVDDNALQCLEEYLRYKAIYGTEL

SEQ ID NO: 797 - protein, 977 aa, Homo sapiens
  SITE (72): Xaa equals any of the naturally occurring L-amino acids
  SITE (762): Xaa equals any of the naturally occurring L-amino acids
GSLSRLPTITMAKGFYISKSLGILGILLGVAAVCTIIALSVVYSQEKNKNANSSPVASTTPSASATTNPASXTTLDQSKAWNRYRLPNTLKPDSYRVTLRPYLTPNDRGLYVFKGSSTVRFTCKEATDVIIIHSKKLNYTLSQGHRVVLRGVGGSQPPDIDKTELVEPTEYLVVHLKGSLVKDSQYEMDSEFEGELADDLAGFYRSEYMEGNVRKVVATTQMQAADARKSFPCFDEPAMKAEFNITLIHPKDLTALSNMLPKGPSTPLPEDPNWNVTEFHTTPKMSTYLLAFIVSEFDYVEKQASNGVLIRIWARPSAIAAGHGDYALNVTGPILNFFAGHYDTPYPLPKSDQIGLPDFNAGAMENWGLVTYRENSLLFDPLSSSSSNKERVVTVIAHELAHQWFGNLVTIEWWNDLWLNEGFASYVEYLGADYAEPTWNLKDLMVLNDVYRVMAVDALASSHPLSTPASEINTPAQISELFDAISYSKGASVLRMLSSFLSEDVFKQGLASYLHTFAYQNTIYLNLWDHLQEAVNNRSIQLPTTVRDIMNRWTLQMGFPVITVDTSTGTLSQEHFLLDPDSNVTRPSEFNYVWIVPITSIRDGRQQQDYWLIDVRAQNDLFSTSGNEWVLLNLNVTGYYRVNYDEENWRKIQTQLQRDHSAIPVINRAQIINDAFNLASAHKVPVTLALNNTLFLIEERQYMPWEAALSSLSYFKLMFDRSEVYGPMKNYLKKQVTPLFIHFRNNTNNWREIPENLMDQYXEVNAISTACSNGVPECEEMVSGLFKQWMENPNNNPIHPNLRSTVYCNAIAQGGEEEWDFAWEQFRNATLVNEADKLRAALACSKELWILNRYLSYTLNPDLIRKQDATSTIISITNNVIGQGLVWDFVQSNWKKLFNDYGGGSFSFSNLIQAVTRRFSTEYELQQLEQFKKDNEETGFGSGTRALEQALEKTKANIKWVKENKEVVLQWFTENSK

SEQ ID NO: 798 - protein, 851 aa, Homo sapiens
  SITE (7): Xaa equals any of the naturally occurring L-amino acids
  SITE (267): Xaa equals any of the naturally occurring L-amino acids
PAANSQXAARPVASPRGAYKASATPRAPAAPYLHRRPHSAALRAAPAAGRAPCPPAPARNRRLRADPGLCVLARSAALRGRGRLSPRGPRGPNMGGCTVKPQLLLLALVLHPWNPCLGADSEKPSSIPTDKLLVITVATKESDGFHRFMQSAKYFNYTVKVLGQGEEWRGGDGINSIGGGQKVRLMKEVMEHYADQDDLVVMFTECFDVIFAGGPEEVLKKFQKANHKVVFAADGILWPDKRLADKYPVVHIGKRYLNSGGFIGYAXYVNRIVQQWNLQDNDDDQLFYTKVYIDPLKREAINITLDHKCKIFQTLNGAVDEVVLKFENGKARAKNTFYETLPVAINGNGPTKILLNYFGNYVPNSWTQDNGCTLCEFDTVDLSAVDVHPNVSIGVFIEQPTPFLPRFLDILLTLDYPKEALKLFIHNKEVYHEKDIKVFFDKAKHEIKTIKIVGPEENLSQAEARNMGMDFCRQDEKCDYYFSVDADVVLTNPRTLKILIEQNRKIIAPLVTRHGKLWSNFWGALSPDGYYARSEDYVDIVQGNRVGVWNVPYMANVYLIKGKTLRSEMNERNYFVRDKLDPDMALCRNAREMTLQREKDSPTPETFQMLSPPKGVFMYISNRHEFGRLLSTANYNTSHYNNDLWQIFENPVDWKEKYINRDYSKIFTENIVEQPCPDVFWFPIFSEKACDELVEEMEHYGKWSGGKHHDSRISGGYENVPTDDIHMKQVDLENVWLHFIREFIAPVTLKVFAGYYTKGFALLNFVVKYSPERQRSLRPHHDASTFTINIALNNVGEDFQGGGCKFLRYNCSIESPRKGWSFMHPGRLTHLHEGLPVKNGTRYIAVSFIDP

SEQ ID NO: 799 - protein, 138 aa, Homo sapiens
  SITE (126): Xaa equals any of the naturally occurring L-amino acids
FAPPFGFMELNYSLVQKVVTRFPPVPQQQLLLASLPAGSLRCITCAVVGNGGILNNSHMGQEIDSHDYVFRLSGALIKGYEQDVGTRTSFYGFTAFSLTQSLLILGNRGFKNVPLGKDVRYLDFLXAPGNMKWLEHCL

SEQ ID NO: 800 - protein, 585 aa, Homo sapiens
LPLCLLMAQQRNGVIFQEGGEKHLKLVGKLYDQCHDTLVQFGGFLASNLSTEDYIKRVPSIDVLCNEFHTPHDAAFFLSRPMYAHHISSKYDELKKSEKGSKQQHKVHKYITSCEMVMAPVHEAVVSLHVSKVWDDISPQFYATFWSLTMYDLAVPHTSYEREVNKLKVQMKAIDDNQEMPPNKKKKEKERCTALQDKLLEEEKKQMEHVQRVLQRLKLEKDNWLLAKSTKNETITKFLQLCIFPRCIFSAIDAVYCARFVELVHQQKTPNFSTLLCYDRVFSDIIYTVASCTENEASRYGRFLCCMLETVTRWHSDRATYEKECGNYPGFLTILRATGFDGGNKADQLDYENFRHVVHKWHYKLTKASVHCLETGEYTHIRNILIVLTKILPWYPKVLNLGQALERRVHKICQEEKEKRPDLYALAMGYSGQLKSRKSYMIPENEFHHKDPPPRNAVASVQNGPGGGPSSSSIGSASKSDESSTEETDKSRERSQCGVKAVNKASSTTPKGNSSNGNSGSNSNKAVKENDKEKGKEKEKEKKEKTPATTPEARVLGKDGKEKPKEERPNKDEKARETKVKNAEV

SEQ ID NO: 801 - protein, 161 aa, Homo sapiens
  SITE (3): Xaa equals any of the naturally occurring L-amino acids
LAXLWGDGSIMASMQKRLQKELLALQNDPPPGMTLNEKSVQNSITQWIVDMEGAPGTLYEGEKFQLLFKFSSRYPFDSPQVMFTGENIPVHPHVYSNGHICLSILTEDWSPALSVQSVCLSIISMLSSCKEKRRPPDNSFYVRTCNKNPKKTKWWYHDDTC

SEQ ID NO: 802 - protein, 298 aa, Homo sapiens
  SITE (18): Xaa equals any of the naturally occurring L-amino acids
  SITE (216): Xaa equals any of the naturally occurring L-amino acids
RKRSLPNKGRRRPRRQSXVQRKKREEEEEEGGESKADDPYAHLSKKEKKKLKKQMEYERQVASLKAANAAENDFSVSQAEMSSRQAMLENASDIKLEKFSISAHGKELFVNADLYIVAGRRYGLVGPNGKGKTTLLKHIANRALSIPPNIDVLLCEQEVVADETPAVQAVLRADTKRLKLLEEERRLQGQLEQGDDTAAERLEKVYEELRATGAAXAEAKARRILAGLGFDPEMQNRPTQKFSGGWRMRVSLARALFMEPTLLMLDEPTNHLDLNAVIWLNKCVTAFASLVPILHFLP

SEQ ID NO: 803 - protein, 281 aa, Homo sapiens
  SITE (3): Xaa equals any of the naturally occurring L-amino acids
  SITE (225): Xaa equals any of the naturally occurring L-amino acids
GAXQYRQHIQVFIDRFRYNANRASQVQSKLKMLEKLPELKPVDKESEVVMKFPDGFEKFSPPILQLDEVDFYYDPKHVIFSRLSVSADLESRICVVGENGAGKSTMLKLLLGDLAPVRGIRHAHRNLKIGYFSQHHVEQLDLNVSAVELLARKFPGRPEEEYRHQLGRYGISGELAMRPLASLSGGQKSRVAFAQMTMPCPNFYILDEPTNHLDMETIEALGRAXNNFRGGVILVSHDERFIRLVCRELWVCEGGGVTRVEGGFDQYRALLQEQFRREGFL

SEQ ID NO: 804 - protein, 65 aa, Homo sapiens [sequence omitted]

SEQ ID NO: 805 - protein, 166 aa, Homo sapiens
  SITE (84): Xaa equals any of the naturally occurring L-amino acids
  SITE (92): Xaa equals any of the naturally occurring L-amino acids
  SITE (105): Xaa equals any of the naturally occurring L-amino acids
  SITE (124): Xaa equals any of the naturally occurring L-amino acids
  SITE (132): Xaa equals any of the naturally occurring L-amino acids
  SITE (144): Xaa equals any of the naturally occurring L-amino acids
  SITE (145): Xaa equals any of the naturally occurring L-amino acids
  SITE (165): Xaa equals any of the naturally occurring L-amino acids
GTGCIRRGHQADHCPSAMALWMRLLPLLALLALWGPDPAAAFVNQHLCGSHLVEALYLVCGERGFFYTPKTRREAEDLQVGQVXLGGGPGAXSLQPLALEGVPAXAWHCGTMLYQHLLPLPAGXLLQLDAAXRQPHTRRLLHRXXWNKALEPAKKKKRGGRFRGXK

SEQ ID NO: 806 - protein, 528 aa, Homo sapiens
  SITE (483): Xaa equals any of the naturally occurring L-amino acids
PLTSTLQELFLNLIPSQCLGGLWGHRDRPGHSHLCPSVRATVTQFNKVAGAVVSSVLGATSTGEGPGEVTIRPLRPPQRARLLEKWIRVAEECRLLRNFSSVYAVVSALQSSPIHRLRAAWGEATRDSLRVFSSLCQIFSEEDNYSQSRELLVQEVKLQSPLEPHSKKAPRSGSRGGGVVPYLGTFLKDLVMLDAASKDELENGYINFDKRRKEFAVLSELRRLQNECRGYNLQPDHDIQRWLQGLRPLTEAQSHRVSCEVEPPGSSDPPAPRVLRPTLVISQWTEVLGSVGVPTPLVSCDRPSTGGDEAPTTPAPLLTRLAQHMKWPSVSSLDSALESSPSLHSPADPSHLSPPASSPRPSRGHRRSASCGSPLSGGAEEASGGTGYGGEGSGPGASDCRIIRVQMELGEDGSVYKSILVTSQDKAPSVISRVLKKNNRDSAVASEYELVQLLPGERELTIPASANVFYAMDGASHDFLLRXRRRSSTATPGVTSGPSASGTPPSEGGGGSFPRIKATGRKIARALF

SEQ ID NO: 807 - protein, 319 aa, Homo sapiens
  SITE (306): Xaa equals any of the naturally occurring L-amino acids
  SITE (316): Xaa equals any of the naturally occurring L-amino acids
  SITE (319): Xaa equals any of the naturally occurring L-amino acids
ASPGRAAGRGLSAGCTTCRGARPLVKEKMLSRLRVVSTTCTLACRHLHIKEKGKPLMLNPRTNKGMAFTLQERQMLGLQGLLPPKIETQDIQALRFHRNLKKMTSPLEKYIYIMGIQERNEKLFYRILQDDIESLMPIVYTPTVGLACSQYGHIFRRPKGLFISISDRGHVRSIVDNWPENHVKAVVVTDGERILGLGDLGVYGMGIPVGKLCLYTACAGIRPDRCLPVCIDVGTDNIALLKDPFYMGLYQKRDRTQQYDDLIDEFMKAITDRYGRNTLIQFEDFGNHNGIQVLEESTEEKYCYFXMMDISRGQLXVSX

SEQ ID NO: 808 - protein, 434 aa, Homo sapiens
IRHEEDTVQVSTLLRPPHCPRMVQDGDFVRYHYNGTLLDGTSFDTSYSKGGTYDTYVGSGWLIKGMDQGLLGMCPGERRKIIIPPFLAYGEKGYGTVIPPQASLVFHVLLIDVHNPKDAVQLETLELPPGCVRRAGAGDFMRYHYNGSLMDGTLFDSSYSRNHTYNTYIGQGYIIPGMDQGLQGACMGERRRITIPPHLAYGENGTGDKIPGSAVLIFNVHVIDFHNPADVVEIRTLSRPSETCNETTKLGDFVRYHYNCSLLDGTQLFTSHDYGAPQEATLGANKVIEGLDTGLQGMCVGERRQLIVPPHLAHGESGARGVPGSAVLLFEVELVSREDGLPTGYLFVWHKDPPANLFEDMDLNKDGEVPPEEFSTFIKAQVSEGKGRLMPGQDPEKTIGDMFQNQDRNQDGKITVDELKLKSDEDEERVHEEL

SEQ ID NO: 809 - protein, 125 aa, Homo sapiens
QGQDKPSGLWPPGPWFPCPTTWSPHGWLAGCPCVCVTHGVSAGLCPGWEGVYVALTVLAQSWWILSMDNDTLRIVLVCFSYLWGIFPLRLLGLLLPQGVLTLRLMRGPLPVSPILSSREVLTPDS

SEQ ID NO: 810 - protein, 240 aa, Homo sapiens
  SITE (9): Xaa equals any of the naturally occurring L-amino acids
  SITE (77): Xaa equals any of the naturally occurring L-amino acids
  SITE (195): Xaa equals any of the naturally occurring L-amino acids
DPERWKHLXKVTPPGSSVSTTPVQVVRLQSPQSQGSMMPSCNRSCSCSRGPSVEDGKWYGVRSYLHLFYEDCAGTAXSDDPEGPPVLCPRRPWPSLCWKISLSSGTLLLLLGVAALTTGYAVPPKLEGIGEGEFLVLDQRAADYNQALGTCRLAGTALCVAAGVLLAICLFWAMIGWLSQDTKAEPLDPEADSHXEVFGDEPEQQLSPIFRNASGQSWFSPPASPFGQSSVQTIQPKRDS

SEQ ID NO: 811 - protein, 855 aa, Homo sapiens
  SITE (479): Xaa equals any of the naturally occurring L-amino acids
  SITE (829): Xaa equals any of the naturally occurring L-amino acids
TDRKHRKAFLEARQSLEVKMNLEEQSQQQENLMLSILPKHVADEMLKDMKKDESQKDQQQFNTMYMYRHENVSILFADIVGFTQLSSACSAQELVKLLNELFARFDKLAAKYHQLRIKILGDCYYCICGLPDYREDHAVCSILMGLAMVEAISYVREKTKTGVDMRVGVHTGTVLGGVLGQKRWQYDVWSTDVTVANKMEAGGIPGRVHISQSTMDCLKGEFDVEPGDGGSRCDYLEEKGIETYLIIASKPEVKKTATQNGLNGSALPNGAPASSKSSSPALIETKEPNGSAHSSGSTSEKPEEQDAQADNPSFPNPRRRLRLQDLADRVVDASEDEHELNQLLNEALLERESAQVVKKRNTFLLSMRFMDPEMETRYSVEKEKQSGAAFSCSCVVLLCTALVEILIDPWLMTNYVTFMVGEILLLILTICSLAAIFPRAFPKKLVAFSTWIDRTRWARNTWAMLAIFILVMANVVDMXSCLQYYTGPSNATAGMETEGSCLENPKYYNYVAVLSLIATIMLVQVSHMVKLTLMLLVAGAVATINLYAWRPVFDEYDHKRFREHDLPMVALEQMQGFNPGLNGTDRLPLVPSKYSMTVMVFLMMLSFYYFSRHVEKLARTLFLWKIEVHDQKERVYEMRRWNEALVTNMLPEHVARHFLGSKKRDEELYSQTYDEIGVMFASLPNFADFYTEESINNGGIECLRFLNEIISDFDSLLDNPKFRVITKIKTIGSTYMAASGVTPDVNTNGFASSNKEDKSERERWQHLADLADFALAMKDTLTNINNQSFNNFMLRIGMNKGGVLAGVIGARKPHYDIWGNTVNVASRMXVHGGHGQHSGGEGNPSSSSEELRVSV

SEQ ID NO: 812 - protein, 207 aa, Homo sapiens
  SITE (9): Xaa equals any of the naturally occurring L-amino acids
RQKGAFLRXSRRAAGLLLLPPRAPAAMFNRAVSRLSRKRPPSDIHDSDGSSSSSHQSLKSTAKWAASLENLLEDPEGVKRFREFLKKEFSEENVLFWLACEDFKKMQDKTQMQEKAKEIYMTFLSSKASSQVNVEGQSRLNEKILEEPHPLMFQKLQDQIFNLMKYDSYSRFLKSDLFLKHKRTEEEEEDLPDAQTAAKRASRIYNT

SEQ ID NO: 813 - protein, 233 aa, Homo sapiens
ARSRAGGGGWGRIAGEITRRGSRARPRPGPQCPPGRPGTAMIKAILIFNNHGKPRLSKFYQPYSEDTQQQIIRETFHLVSKRDENVCNFLEGGLLIGGSDNKLIYRHYATLYFVFCVDSSESELGILDLIQVFVETLDKCFENVCELDLIFHVDKVHNILAEMVMGGMVLETNMNEIVTQIDAQNKLEKSEAGLAGAPARAVSAVKNMNLPEIPRNINIGDISIKVPNLPSFK

SEQ ID NO: 814 - protein, 353 aa, Homo sapiens
  SITE (7): Xaa equals any of the naturally occurring L-amino acids
NLILWRXAMQLEIQVALNFIISYLYNKLPRRRVNIFGEELERLLKKKYEGHWYPEKPYKGSGFRCIHIGEKVDPVIEQASKESGLDIDDVRGNLPQDLSVWIDPFEVSYQIGEKGPVKVLYVDDNNENGCELDKEIKNSFNPEAQVFMPISDPASSVSSSPSPPFGHSAAVSPTFMPRSTQPLTFTTATFAATKFGSTKMKNSGRSNKVARTSPINLGLNVNDLLKQKAISSSMHSLYGLGLGSQQQPQQQQQPAQPPPPPPPPQQQQQQKTSALSPNAKEFIFPNMQGQGSSTNGMFPGDSPLNLSPLQYSNAFDVFAAYGGLNEKSFVDGLNFSLNNMQYSNQQFQPVMAN

SEQ ID NO: 815 - protein, 82 aa, Homo sapiens
  SITE (29): Xaa equals any of the naturally occurring L-amino acids
LSACFAYHRDISMAVPPCRVAYQTDVDCXISWQHQSMGCLTFWYLSSDHPYPMFSFKHYPASLFIIRNSGPSVWWHLESFVP

SEQ ID NO: 816 - protein, 328 aa, Homo sapiens
  SITE (170): Xaa equals any of the naturally occurring L-amino acids
  SITE (172): Xaa equals any of the naturally occurring L-amino acids
  SITE (174): Xaa equals any of the naturally occurring L-amino acids
  SITE (178): Xaa equals any of the naturally occurring L-amino acids
  SITE (183): Xaa equals any of the naturally occurring L-amino acids
  SITE (269): Xaa equals any of the naturally occurring L-amino acids
  SITE (286): Xaa equals any of the naturally occurring L-amino acids
FTVSSGPFNIINVSLSGGTNEEILESIRAKKGDIDNVKSPTGEETEKDKNETENDSKDAEKNREEFEDQSLEKDSDDKTPDDDPEQGKSEVGDFKSEKSNGELSESPGAGKGASGSTRIITRLRNPDSKLSQLKSQQVAAAAHEANKLFKEGKEVLVVNSQGEISRLSTXKXVXMKGXINNYXKLGQEGKYRVYHNQYSTNSFALNKHQHREDHDKRRHLAHKFCLTPAGEFKWNGSVHGSKVLTISTLRLTITQLENNIPSSFLHPNXASHRANWIKAVQMCSKXREFALALAILECAVKPVVMLPIWRESLGHTSFLPLSHNHVHQ

SEQ ID NO: 817 - protein, 290 aa, Homo sapiens
  SITE (210): Xaa equals any of the naturally occurring L-amino acids
  SITE (213): Xaa equals any of the naturally occurring L-amino acids
  SITE (271): Xaa equals any of the naturally occurring L-amino acids
  SITE (290): Xaa equals any of the naturally occurring L-amino acids
ELILEPKDLYIDRPLPYLIGSKLFMEQEDVGLGELSSEEGSVGSDRGSIVDTEEEKEEEESDEDFAHHSDNEQNQHTTQMSDEEEDDDGCDLFADSEKEEEDIEDIEENTRPKRSRPTSFADELAARIKGDAMGRVDEEPTTLPSGEAKPRKTLKEKKERRTPSDDEEDNLFAPPKLTDEDFSPFGSGGGLFSGGKGLFDDEDEESDLFXEAXQDRQAGASVKEESSSSKPGKKIPAGAVSVFLGDTDVFGAASVPSLKEPQKPEQPTPRXSPYGPPPTGLFDDDDGDDX

SEQ ID NO: 818 - protein, 117 aa, Homo sapiens
  SITE (15): Xaa equals any of the naturally occurring L-amino acids
KRQLAVQSLAFNLKXKVFCELFPEVVEVRKTEVGFAFPCVKTLEFHLFPKSKICVLKLQTSPGDGSSPPGAPRQGRQKAWALGGGLRTAVLVGRGLGLSHRGVELVVLSSQLGGVWG

SEQ ID NO: 819 - protein, 157 aa, Homo sapiens
  SITE (29): Xaa equals any of the naturally occurring L-amino acids
  SITE (130): Xaa equals any of the naturally occurring L-amino acids
PGVCCSAGASFRRGADFDSWGQLVEAIDXYQILARHLQKEAQAQHNNSEFTEEQKKTIGKIATCLGIASAALQSTQSQEEFKLEDLKKLEPILKNILTYNKEFPFDVQPVPLRRFWHLVKKRIWEFGRRXKKRVVLGAGSPDSFSCLEFPGTFIYPR

SEQ ID NO: 820 - protein, 77 aa, Homo sapiens
RETACCGRDARGAAPAAMAVTALAARTWLGVWGVRTMQARGFGSDQSENVDRGAGSIREAGGAFGKREQAEEERYFR

SEQ ID NO: 821 - protein, 74 aa, Homo sapiens
HLGFIGTKNKSYTSCTLFFEFLLMRNIHFCIDSDFKIALSAFKGFLTSRAHQNCQVPSGSEAVSLGGLWHQHFH

SEQ ID NO: 822 - protein, 451 aa, Homo sapiens
  SITE (49): Xaa equals any of the naturally occurring L-amino acids
  SITE (178): Xaa equals any of the naturally occurring L-amino acids
  SITE (205): Xaa equals any of the naturally occurring L-amino acids
  SITE (220): Xaa equals any of the naturally occurring L-amino acids
  SITE (278): Xaa equals any of the naturally occurring L-amino acids
  SITE (393): Xaa equals any of the naturally occurring L-amino acids
  SITE (435): Xaa equals any of the naturally occurring L-amino acids
RPLPTSTNVKTLTGFGPGLAMETALRSPDRPECIRLYAPPFILAPVKDXQTELGETFGEAGQKYNVLFVGYCLSHDQRWILASCTDLYGELLETCIINIDVPNRARRKKSSARKFGLQKLWEWCLGLVQMSSLPWRVVIGRLGRIGHGELKDWSCLLSRRNLQSLSKRLKDMCRMCGXSAADSPSILSACLVAMEPQGSFVIMPXSVSTGSVFGRSTTLXMQTSQLNTPQDTSCTHILVFPTSASVQVASATYTTENLDLAFNPNNDGADGMGIFDLXDTGDDLDPDIINILPASPTGSPVHSPGSHYPHGGDAGKGQSTDRLLSTEPHEEVPNILQQPLALGYFVSTAKAGPLPDWFWSACPQAQYQCPLFLKASLHLHVPSVQSDELLHSXHSHPLDSNQTSDVLRFVLEQYNALSWLTCDPATQDRRSCLPXHFVVLNQLYNFIMNML

SEQ ID NO: 823 - protein, 211 aa, Homo sapiens
ILIATDVASRGLDVEDVKFVINYDYPNSSEDYVHRIGRTARSTNKGTAYTFFTPGNLKQARELIKVLEEANQAINPKLMQLVDHRGGGGGGGGRSRYRTTSSANNPNLMYQDECDRSFEESRMVAGETLQAIGIVVKPIELVMLMAVAMEVQILPLEHKQANTPMVKAPMGQLLMAPVAIQLKNMVLALMELVAPPQLGEVHRALASSLVG

SEQ ID NO: 824 - protein, 22 aa, Homo sapiens
GRPTRPGVSSCLPGWSRTPGLK

SEQ ID NO: 825 - protein, 393 aa, Homo sapiens
  SITE (96): Xaa equals any of the naturally occurring L-amino acids
TTVTRCSPTVAFVEFPSSPQLKNDVSEEKDQKKPENEMSGKVELVLSQKVVKPKSPEPEATLTFPFLDKMPEANQLHLPNLNSQVDSPSSEKSPVXTPFKFWAWDPEEERRRQEKWQQEQERLLQERYQKEQDKLKEEWEKAQKEVEEEERRYYEEERKIIEDTVVPFTVSSSSADQLSTSSSMTEGSGTMNKIDLGNCQDEKQDRRWKKSFQGDDSDLLLKTRESDRLEEKGSLTEGALAHSGNPVSKGVHEDHQLDTEAGAPHCGTNPQLAQDPSQNQQTSNPTHSSEDVKPKTLPLDKSINHQIESPSERRKSISGKKLCSSCGLPLGKGAAMIIETLNLYFHIQCFRCGICKGQLGDAVSGTDVRIRNGLLNCNDCYMRSRSAGQPTTL

SEQ ID NO: 826 - protein, 265 aa, Homo sapiens
  SITE (72): Xaa equals any of the naturally occurring L-amino acids
HSPVPQSLPARCAAAEAMRLIQNMCTIAEYPAPGNAAASDCCVGAAGRRLVKIAVVGASGVGKTALVVRFLXKRFIGDYERNAGNLYTRQVQIEGETLALQVQDTPGIQVHENSLSCSEQLNRCIRWADAVVIVFSITDYKSYELISQLHQHVQQLHLGTRLPVVVVANKADLLHIKQVDPQLGLQLASMLGCSFYEVSVSENYNDVYSAFHVLCKEVSHKQQPSSTPEKRRTSLIPRPKSPNMQDLKRRFKQALSAKVRTVTSV

SEQ ID NO: 827 - protein, 555 aa, Homo sapiens
  SITE (479): Xaa equals any of the naturally occurring L-amino acids
NIYFKEKRKRGGAKMAGAIIENMSTKKLCIVGGILLVFQIIAFLVGGLIAPGPTTAVSYMSVKCVDARKNHHKTKWFVPWGPNHCDKIRDIEEAIPREIEANDIVFSVHIPLPHMEMSPWFQFMLFILQLDIAFKLNNQIRENAEVSMDVSLAYRDDAFAEWTEMAHERVPRKLKCTFTSPKTPEHEGRYYECDVLPFMEIGSVAHKFYLLNIRLPVNEKKKINVGIGEIKDIRLVGIHQNGGFTKVWFAMKTFLTPSIFIIMVWYWRRITMMSRPPVLLEKVIFALGISMTFINIPVEWFSIGFDWTWMLLFGDIRQGIFYAMLLSFWIIFCGEHMMDQHERNHIAGYWKQVGPIAVGSFCLFIFDMCERGVQLTNPFYSIWTTDIGTELAMAFIIVAGICLCLYFLFLCFMVFQVFRNISGKQSSLPAMSKVRRLHYEGLIFRFKFLMLITLACAAMTVIFFIVSQVTEGHWKWGGXTVQVNSAFFTGIYGMWNLYVFALMFLYAPSHKNYGEDQSNGDLGVHSGEELQLTTTITHVDGPTEIYKLTRKEAQE

SEQ ID NO: 828 - protein, 292 aa, Homo sapiens
LEGGTMQELHLLWWALLLGLAQACPEPCDCGEKYGFQIADCAYRDLESVPPGFPANVTTLSLSANRLPGLPEGAFREVPLLQSLWLAHNEIRTVAAGALASLSHLKSLDLSHNLISDFAWSDLHNLSALQLLKMDSNELTFIPRDAFRSLRALRSLQLNHNRLHTLAEGTFTPLTALSHLQINENPFDCTCGIVWLKTWALTTAVSIPEQDNIACTSPHVLKGTPLSRLPPLPCSAPSVQLSYQPSQDGAELRPGFVLALHCDVDGQPAPAASLAHPDTQWHCGDHQPQRGH

SEQ ID NO: 829 - protein, 85 aa, Homo sapiens
KTGKRWHLQGNTRAAQKSCWDEELQTCVVDFLAFCLFYSQGWGITTKEVVFWPGVVAHACNPSTLGGRGRVDHKVRRSRPSWLTR

SEQ ID NO: 830 - protein, 48 aa, Homo sapiens
DGACSVAQAGVPWHDLGSLQAPPPGFTPFSCLSLPSSWEYRRPPPRLG

SEQ ID NO: 831 - protein, 47 aa, Homo sapiens
ATPGLFRIFSRDGFPHVGQAGLELLTSSDPPGSAYRSAEIPGVSHRA

SEQ ID NO: 832 - protein, 28 aa, Homo sapiens
SIRLGLLKCRDYRHYPLCPVTIEIITLQ

SEQ ID NO: 833 - protein, 22 aa, Homo sapiens
FCISRDGVSPCWPGWSQTPGLK

SEQ ID NO: 834 - protein, 52 aa, Homo sapiens
  SITE (6): Xaa equals any of the naturally occurring L-amino acids
  SITE (20): Xaa equals any of the naturally occurring L-amino acids
  SITE (49): Xaa equals any of the naturally occurring L-amino acids
SQLLGXLRQENRLNPGGGDXSEPRSHHCTPVWQQRQDSISKRKEKKTLXLYS

SEQ ID NO: 835 - protein, 86 aa, Homo sapiens
  SITE (6): Xaa equals any of the naturally occurring L-amino acids
  SITE (15): Xaa equals any of the naturally occurring L-amino acids
  SITE (41): Xaa equals any of the naturally occurring L-amino acids
  SITE (60): Xaa equals any of the naturally occurring L-amino acids
  SITE (63): Xaa equals any of the naturally occurring L-amino acids
  SITE (64): Xaa equals any of the naturally occurring L-amino acids
  SITE (65): Xaa equals any of the naturally occurring L-amino acids
  SITE (66): Xaa equals any of the naturally occurring L-amino acids
  SITE (67): Xaa equals any of the naturally occurring L-amino acids
  SITE (72): Xaa equals any of the naturally occurring L-amino acids
  SITE (86): Xaa equals any of the naturally occurring L-amino acids
NSVSTXDTKNSQAWXQAPVIPATREAKAGELLELRGWRLQXVEIVPLHSSLGNRARLCLXKKXXXXXEKQHXGVSVNLSSAALLIX

SEQ ID NO: 836 - protein, 46 aa, Homo sapiens
  SITE (4): Xaa equals any of the naturally occurring L-amino acids
  SITE (6): Xaa equals any of the naturally occurring L-amino acids
  SITE (28): Xaa equals any of the naturally occurring L-amino acids
  SITE (42): Xaa equals any of the naturally occurring L-amino acids
LLEXFXAHRPQWEGVVFPRESVTDHVNXLTPLVKPVTELYLXFSSL

SEQ ID NO: 837 - protein, 129 aa, Homo sapiens
  SITE (77): Xaa equals any of the naturally occurring L-amino acids
  SITE (125): Xaa equals any of the naturally occurring L-amino acids
IANIRNERVDITTDPMDIRRIIKECSEQLYAHIFDNLDEMEQVLERHNLPKLTQEEIDHLNRPISILKFESIINNFXKQKALGPDVFAGEFYQTYKEDIIPIIYNLFWRIEAEGNTFWLILGGQXYSNT

SEQ ID NO: 838 - protein, 76 aa, Homo sapiens
  SITE (15): Xaa equals any of the naturally occurring L-amino acids
  SITE (58): Xaa equals any of the naturally occurring L-amino acids
  SITE (60): Xaa equals any of the naturally occurring L-amino acids
YTLLELELPRLLAPXLPSNGSSLKDLKWTHSNYRASKESCIVIFRHYLPGSGMGNLRXCXLPWMWEPFLRSLSGIG

SEQ ID NO: 839 - protein, 102 aa, Homo sapiens
  SITE (52): Xaa equals any of the naturally occurring L-amino acids
  SITE (60): Xaa equals any of the naturally occurring L-amino acids
  SITE (67): Xaa equals any of the naturally occurring L-amino acids
  SITE (100): Xaa equals any of the naturally occurring L-amino acids
TTIRISITSERSTPLTTLLVSTTLPTSFPGASIASTPPLDTSTTFTPSTDTXSTPTIPVXTTISVSXITEGSTPGTTIFIPSTPVTSSTADDFPATTGAXST

SEQ ID NO: 840 - protein, 81 aa, Homo sapiens
  SITE (72): Xaa equals any of the naturally occurring L-amino acids
  SITE (75): Xaa equals any of the naturally occurring L-amino acids
  SITE (76): Xaa equals any of the naturally occurring L-amino acids
  SITE (79): Xaa equals any of the naturally occurring L-amino acids
PRSPSGSAMPCSEETPAISPSKRARPAEVGGMQLRFARLSEHATAPTRGSARAAGYDLYSAYDYTIPPMEKXPPXXNAXDS

SEQ ID NO: 841 - protein, 55 aa, Homo sapiens
  SITE (44): Xaa equals any of the naturally occurring L-amino acids
QARVQWLFTDANIVHCSLQLLASSDPPVSTSQVGLQACADDAQXPELCLSLSPTT

SEQ ID NO: 842 - protein, 99 aa, Homo sapiens
LYGCEKTTEGGQPLFQPLAGFHHCCSCSTALFRTQTTAAAVPRMVIRVYIASSSGSTAIKKKQQDVLGFLEANKIGFEEKDIAANEENRKWMRENVPGK

SEQ ID NO: 843 - protein, 66 aa, Homo sapiens
  SITE (8): Xaa equals any of the naturally occurring L-amino acids
  SITE (41): Xaa equals any of the naturally occurring L-amino acids
  SITE (52): Xaa equals any of the naturally occurring L-amino acids
SRKVPTFXTPWPDFVPRAGGENYKEFSELLPNRQGLKKADXSFWSKYISSLXTSADGAKGGAVSRE

SEQ ID NO: 844 - protein, 144 aa, Homo sapiens
  SITE (111): Xaa equals any of the naturally occurring L-amino acids
  SITE (117): Xaa equals any of the naturally occurring L-amino acids
  SITE (135): Xaa equals any of the naturally occurring L-amino acids
  SITE (136): Xaa equals any of the naturally occurring L-amino acids
FVEGVNKKLGLLGDSLDIFKGIPFAAPTKALENPQPHPGWQGTLKAKNFKKRCLQATITQDSTYGDEDCLYLNIWVPQGRKQVSRDLPVMIWIYGGAFLMGSGHGANFLNXYLYDGXEIATRGNVIVVTFNYPCXXPWVLTLGT

SEQ ID NO: 845 - protein, 83 aa, Homo sapiens
  SITE (72): Xaa equals any of the naturally occurring L-amino acids
  SITE (74): Xaa equals any of the naturally occurring L-amino acids
  SITE (80): Xaa equals any of the naturally occurring L-amino acids
  SITE (81): Xaa equals any of the naturally occurring L-amino acids
HSVLPPLRRRVSLPVAMEEEIAALVIDNGSGMCKAGFAGERRSPSRVSFHRRAPQDTRASWWGMGQKGLLLXAXKAQNKXXLP

SEQ ID NO: 846 - protein, 168 aa, Homo sapiens
  SITE (44): Xaa equals any of the naturally occurring L-amino acids
  SITE (100): Xaa equals any of the naturally occurring L-amino acids
  SITE (114): Xaa equals any of the naturally occurring L-amino acids
  SITE (136): Xaa equals any of the naturally occurring L-amino acids
  SITE (139): Xaa equals any of the naturally occurring L-amino acids
  SITE (166): Xaa equals any of the naturally occurring L-amino acids
EKQVRVLTDAVDDITSIDDFLAVSENHILEDVNKCVIALQEKDXDGLDRTAGAIRGRAARVIHVVTSEMDNYEPGVYTEKVLEATKLLSNTVMPRRSQPXKPSARTLPSPWMRXSLSMLPAWYMMASGDIRKAVLXIRXPLRSWMTLTLRQEDLMSEAGRASRQKXIS

SEQ ID NO: 847 - protein, 109 aa, Homo sapiens
  SITE (79): Xaa equals any of the naturally occurring L-amino acids
  SITE (93): Xaa equals any of the naturally occurring L-amino acids
QNSGCLTMAWIPLLLPLLTLCTGSEASYELTQPPSVSVSPGQTARITCSGDALPKQYAYWYQQRPGQAPVQVIYKDSEXASRIPERISGSSSXTTVTLTIQWGPSKKQS

SEQ ID NO: 848 - protein, 145 aa, Homo sapiens
  SITE (1): Xaa equals any of the naturally occurring L-amino acids
  SITE (5): Xaa equals any of the naturally occurring L-amino acids
  SITE (11): Xaa equals any of the naturally occurring L-amino acids
  SITE (14): Xaa equals any of the naturally occurring L-amino acids
  SITE (21): Xaa equals any of the naturally occurring L-amino acids
  SITE (52): Xaa equals any of the naturally occurring L-amino acids
  SITE (72): Xaa equals any of the naturally occurring L-amino acids
  SITE (78): Xaa equals any of the naturally occurring L-amino acids
  SITE (95): Xaa equals any of the naturally occurring L-amino acids
  SITE (117): Xaa equals any of the naturally occurring L-amino acids
  SITE (128): Xaa equals any of the naturally occurring L-amino acids
  SITE (132): Xaa equals any of the naturally occurring L-amino acids
  SITE (139): Xaa equals any of the naturally occurring L-amino acids
  SITE (140): Xaa equals any of the naturally occurring L-amino acids
XKFSXEEDGRXSDXEGAEGHXDSQSASGEERPPEADGKKGNSPNSEPPTPKXAWAETSRPPETEPGPPAPKXPLPPPXRGPAGNWGPPGDYPDRXGLPASPQHLEVEDEAWRHDESXRLLNFLGIGRXRRRXEEKAAVXXSSRGQ

SEQ ID NO: 849 - protein, 109 aa, Homo sapiens
  SITE (1): Xaa equals any of the naturally occurring L-amino acids
  SITE (7): Xaa equals any of the naturally occurring L-amino acids
  SITE (27): Xaa equals any of the naturally occurring L-amino acids
  SITE (37): Xaa equals any of the naturally occurring L-amino acids
  SITE (38): Xaa equals any of the naturally occurring L-amino acids
  SITE (46): Xaa equals any of the naturally occurring L-amino acids
  SITE (50): Xaa equals any of the naturally occurring L-amino acids
  SITE (57): Xaa equals any of the naturally occurring L-amino acids
  SITE (67): Xaa equals any of the naturally occurring L-amino acids
  SITE (78): Xaa equals any of the naturally occurring L-amino acids
  SITE (79): Xaa equals any of the naturally occurring L-amino acids
  SITE (90): Xaa equals any of the naturally occurring L-amino acids
  SITE (91): Xaa equals any of the naturally occurring L-amino acids
  SITE (97): Xaa equals any of the naturally occurring L-amino acids
XVRLLVXVRNSRVDPLVRPNMGDSAVXTHWEPYTTEXXGYLEITKXMGSXSMKWSLXTNFLRYWTLXYLALPTVNRPXXHPCAPHRGTPXXLPCSPXGESEDCPHAGHR

SEQ ID NO: 850 - protein, 200 aa, Homo sapiens
  SITE (140): Xaa equals any of the naturally occurring L-amino acids
  SITE (167): Xaa equals any of the naturally occurring L-amino acids
  SITE (168): Xaa equals any of the naturally occurring L-amino acids
  SITE (180): Xaa equals any of the naturally occurring L-amino acids
LDITVMVFHHFGKDFPKSEKLSPDAFIQMALQLAYYRIYGQACATYESASLRMFHLGRTDTIRSASMDSLTFVKAMDDSSVTEHQKVELLRKAVQAHRGYTDRAIRGEAFDRHLLGLKLQAIEDLVSMPDIFMDTFYAIXMHFTSSQPGPARQMCMSSGPWSRRLRXXYNPWRPHNFSLXATQLRGDNAAAGHTEKALES

SEQ ID NO: 851 - protein, 144 aa, Homo sapiens
  SITE (123): Xaa equals any of the naturally occurring L-amino acids
  SITE (129): Xaa equals any of the naturally occurring L-amino acids
  SITE (132): Xaa equals any of the naturally occurring L-amino acids
INQGLFELLFFWNTSLSHAQQYRWYQMLYQAGVFASRSSLRCCRIRFTWALALLQCLNLVFLLADVWFGFLPSIYLVFLIILYEGLLGGALTVNTFHNIALETSDEHREFAMGGNCILKNGDXLSGSGXALXIPWQSLKSGLRE

SEQ ID NO: 852 - protein, 135 aa, Homo sapiens
  SITE (6): Xaa equals any of the naturally occurring L-amino acids
  SITE (10): Xaa equals any of the naturally occurring L-amino acids
  SITE (16): Xaa equals any of the naturally occurring L-amino acids
  SITE (40): Xaa equals any of the naturally occurring L-amino acids
  SITE (54): Xaa equals any of the naturally occurring L-amino acids
  SITE (62): Xaa equals any of the naturally occurring L-amino acids
  SITE (87): Xaa equals any of the naturally occurring L-amino acids
  SITE (105): Xaa equals any of the naturally occurring L-amino acids
  SITE (116): Xaa equals any of the naturally occurring L-amino acids
  SITE (120): Xaa equals any of the naturally occurring L-amino acids
  SITE (129): Xaa equals any of the naturally occurring L-amino acids
TSGSKXFGQXGLVSHXRTTTRPSPYDDLTYGEGEENPDQXTDPGAGAEIPTSTXDTSNSSNXAPPPGEGADDLEGEFTEETIRNLDXNYYDPYYDPTSSPVGDRXGNAGEPGYHLXRDLXTSGRERPKXGTIDFE

SEQ ID NO: 853 - protein, 70 aa, Homo sapiens
  SITE (2): Xaa equals any of the naturally occurring L-amino acids
  SITE (6): Xaa equals any of the naturally occurring L-amino acids
  SITE (8): Xaa equals any of the naturally occurring L-amino acids
  SITE (10): Xaa equals any of the naturally occurring L-amino acids
  SITE (16): Xaa equals any of the naturally occurring L-amino acids
  SITE (26): Xaa equals any of the naturally occurring L-amino acids
  SITE (30): Xaa equals any of the naturally occurring L-amino acids
  SITE (34): Xaa equals any of the naturally occurring L-amino acids
  SITE (39): Xaa equals any of the naturally occurring L-amino acids
  SITE (43): Xaa equals any of the naturally occurring L-amino acids
  SITE (65): Xaa equals any of the naturally occurring L-amino acids
AXLIRXRXGXSQATLXVTTTSTSYRXQPMXFVIXFFIVXTLIXGGFGQLTSSLIMGAPIWGLPAXNNISF

SEQ ID NO: 854 - protein, 137 aa, Homo sapiens
  SITE (7): Xaa equals any of the naturally occurring L-amino acids
  SITE (12): Xaa equals any of the naturally occurring L-amino acids
  SITE (13): Xaa equals any of the naturally occurring L-amino acids
  SITE (20): Xaa equals any of the naturally occurring L-amino acids
  SITE (45): Xaa equals any of the naturally occurring L-amino acids
  SITE (72): Xaa equals any of the naturally occurring L-amino acids
  SITE (79): Xaa equals any of the naturally occurring L-amino acids
  SITE (109): Xaa equals any of the naturally occurring L-amino acids
  SITE (112): Xaa equals any of the naturally occurring L-amino acids
  SITE (114): Xaa equals any of the naturally occurring L-amino acids
  SITE (117): Xaa equals any of the naturally occurring L-amino acids
  SITE (128): Xaa equals any of the naturally occurring L-amino acids
  SITE (130): Xaa equals any of the naturally occurring L-amino acids
  SITE (133): Xaa equals any of the naturally occurring L-amino acids
PQSQGLXPFGQXXVKELNRXGVLIDLAHVSVATMKATLQLSRAPXIFSHSSAYSVCASRRNVPDDVLRLVKXTDSLVMXNFYNNYISCTNKANLSQVADHLDHIKEVAXARXVXFGXDFDGGPRVPEXLXDAXSIQT

SEQ ID NO: 855 - protein, 84 aa, Homo sapiens
  SITE (20): Xaa equals any of the naturally occurring L-amino acids
  SITE (31): Xaa equals any of the naturally occurring L-amino acids
  SITE (74): Xaa equals any of the naturally occurring L-amino acids
GDIRSGCNGDSGGPLNCPTXDGGWQVHGVTXFVSAFGCNTRRKPTVFTRVSAFIDWIEETIASHLETKGPPWQXLNRSHILEIK

SEQ ID NO: 856 - protein, 117 aa, Homo sapiens
  SITE (106): Xaa equals any of the naturally occurring L-amino acids
ARAQNDLEQVLRQIGDKDQKIQNLEALLQKSKENISLLEKEREDLYAKIQAGEGETAVLNQLQEKNHTLQEQVTQLTEKLEESVRKFINKPRENLHGPGTRAEGHXLELAQDRVPFP

SEQ ID NO: 857 - protein, 62 aa, Homo sapiens
  SITE (2): Xaa equals any of the naturally occurring L-amino acids
  SITE (3): Xaa equals any of the naturally occurring L-amino acids
  SITE (9): Xaa equals any of the naturally occurring L-amino acids
  SITE (15): Xaa equals any of the naturally occurring L-amino acids
  SITE (16): Xaa equals any of the naturally occurring L-amino acids
  SITE (30): Xaa equals any of the naturally occurring L-amino acids
  SITE (43): Xaa equals any of the naturally occurring L-amino acids
  SITE (45): Xaa equals any of the naturally occurring L-amino acids
  SITE (50): Xaa equals any of the naturally occurring L-amino acids
GXXEAQTSXPWNLHXXHHSLSPIVLMGALXFPVPSFLPPGLPXNXAAYSXPKLRGSFPPASL

SEQ ID NO: 858 - protein, 133 aa, Homo sapiens
  SITE (119): Xaa equals any of the naturally occurring L-amino acids
  SITE (124): Xaa equals any of the naturally occurring L-amino acids
  SITE (125): Xaa equals any of the naturally occurring L-amino acids
  SITE (127): Xaa equals any of the naturally occurring L-amino acids
  SITE (132): Xaa equals any of the naturally occurring L-amino acids
  SITE (133): Xaa equals any of the naturally occurring L-amino acids
NSARGDKFFTSHNGMQFSTWDNDNDKFEGNCAEQDGSGWWMNKCHAGHLNGVYYQGGTYSKASTPNGYDNGIIWATWKTRWYSMKKTTMEGKSHSTDSQLEEGQQHHLGGAKQVRPEHXAETGXXSXYPEGXX

SEQ ID NO: 859 - protein, 162 aa, Homo sapiens
WIPRAAGIRHEESGRKVQSGNINAAKTIADIIRTCLGPKSMMKMLLDPMGGIVMTNDGNAILREIQVQHPAAKSMIEISRTQDEEVGDGTTSVIILAGEMLSVAEHFLEQQMHPTVVISAYRKALDDMISTLKKISIPVDISDSDMMLNIINSSITTKGISR

SEQ ID NO: 860 - protein, 89 aa, Homo sapiens
  SITE (73): Xaa equals any of the naturally occurring L-amino acids
  SITE (87): Xaa equals any of the naturally occurring L-amino acids
RMTSRKKVLLKVIILGDSGVGKTSLMNQYVNKKFSNQYKATIGADFLTKDVMVDDRLVTMQIWGHSRTGTVPXSRCGLLQRCKLLRXGI

SEQ ID NO: 861 - protein, 40 aa, Homo sapiens
  SITE (4): Xaa equals any of the naturally occurring L-amino acids
  SITE (6): Xaa equals any of the naturally occurring L-amino acids
IPGXIXVHTRFQMPDQGITSADDFFQGTKAALAGGTTMNH

SEQ ID NO: 862 - protein, 123 aa, Homo sapiens
KHKREIYDRYGREGLTGTGTGPSRAEAGSGGPGFTFTFRSPEEVFREFFGIGDPFAELFDDLGPFSRASRTGFPTLKPLLYFSSSFPGHPILLLIFSFNPGLVLSLCFYSTPLSKEAHPHPKS

SEQ ID NO: 863 - protein, 99 aa, Homo sapiens
  SITE (77): Xaa equals any of the naturally occurring L-amino acids
  SITE (80): Xaa equals any of the naturally occurring L-amino acids
  SITE (88): Xaa equals any of the naturally occurring L-amino acids
  SITE (91): Xaa equals any of the naturally occurring L-amino acids
REMLTHRNGLVKKGKEQNTQRSFFLRMKCTLTSRGRTMNIKSATWKVLHCTGHIHVYDTNSNQPQCGYKKPPMTCLXLIXEPIPHPSXIEXPLHTKTFL

SEQ ID NO: 864 - protein, 99 aa, Homo sapiens
  SITE (40): Xaa equals any of the naturally occurring L-amino acids
  SITE (47): Xaa equals any of the naturally occurring L-amino acids
  SITE (58): Xaa equals any of the naturally occurring L-amino acids
  SITE (75): Xaa equals any of the naturally occurring L-amino acids
  SITE (86): Xaa equals any of the naturally occurring L-amino acids
RVPAQLLGLLLLWLPGAECDIQMTQSPSTLSASVGDRITXTCRASQXIENWLAWYQQXPGKPPKLLLISDASSLXSGVPSRFSGMXLGRNSLSPFPACS

SEQ ID NO: 865 - protein, 96 aa, Homo sapiens
  SITE (31): Xaa equals any of the naturally occurring L-amino acids
  SITE (79): Xaa equals any of the naturally occurring L-amino acids
  SITE (89): Xaa equals any of the naturally occurring L-amino acids
  SITE (92): Xaa equals any of the naturally occurring L-amino acids
  SITE (93): Xaa equals any of the naturally occurring L-amino acids
VQMQVQDILEQNEALKAQIQQFHSQIAAQTXASVLAEELHKVIAEKDKQIKQTEDSLTSERDRLTSKEEELKDIQNMNXLLKAEVQKLXALXXEQA

SEQ ID NO: 866 - protein, 79 aa, Homo sapiens
DYRVHIISFKDPNPMHIDATFNIIGPGIVLSNPDRPCHQIDLFKKAGWTIITPPTPIIPDDHPLWDVIQMAFHECLNAR

SEQ ID NO: 867 - protein, 119 aa, Homo sapiens
  SITE (3): Xaa equals any of the naturally occurring L-amino acids
  SITE (9): Xaa equals any of the naturally occurring L-amino acids
  SITE (31): Xaa equals any of the naturally occurring L-amino acids
  SITE (37): Xaa equals any of the naturally occurring L-amino acids
  SITE (42): Xaa equals any of the naturally occurring L-amino acids
  SITE (56): Xaa equals any of the naturally occurring L-amino acids
  SITE (57): Xaa equals any of the naturally occurring L-amino acids
  SITE (59): Xaa equals any of the naturally occurring L-amino acids
  SITE (62): Xaa equals any of the naturally occurring L-amino acids
  SITE (66): Xaa equals any of the naturally occurring L-amino acids
  SITE (69): Xaa equals any of the naturally occurring L-amino acids
  SITE (84): Xaa equals any of the naturally occurring L-amino acids
  SITE (94): Xaa equals any of the naturally occurring L-amino acids
  SITE (96): Xaa equals any of the naturally occurring L-amino acids
  SITE (101): Xaa equals any of the naturally occurring L-amino acids
  SITE (103): Xaa equals any of the naturally occurring L-amino acids
  SITE (108): Xaa equals any of the naturally occurring L-amino acids
  SITE (110): Xaa equals any of the naturally occurring L-amino acids
  SITE (113): Xaa equals any of the naturally occurring L-amino acids
  SITE (116): Xaa equals any of the naturally occurring L-amino acids
  SITE (119): Xaa equals any of the naturally occurring L-amino acids
QKXATKRKXVACRYRSGIPGSTHASAWARTXPRRRAXGWGAXWARSQGLDPTGPCXXDXPEXVRWXPSXAVCVDVIHTYSSPIXPPRCFRMTQXVXHLDFXPXGRKDXPXVKXCSXHHX

SEQ ID NO: 868 - protein, 178 aa, Homo sapiens
  SITE (50): Xaa equals any of the naturally occurring L-amino acids
  SITE (81): Xaa equals any of the naturally occurring L-amino acids
  SITE (94): Xaa equals any of the naturally occurring L-amino acids
  SITE (101): Xaa equals any of the naturally occurring L-amino acids
  SITE (105): Xaa equals any of the naturally occurring L-amino acids
  SITE (106): Xaa equals any of the naturally occurring L-amino acids
  SITE (108): Xaa equals any of the naturally occurring L-amino acids
  SITE (111): Xaa equals any of the naturally occurring L-amino acids
  SITE (112): Xaa equals any of the naturally occurring L-amino acids
  SITE (127): Xaa equals any of the naturally occurring L-amino acids
  SITE (132): Xaa equals any of the naturally occurring L-amino acids
  SITE (133): Xaa equals any of the naturally occurring L-amino acids
  SITE (138): Xaa equals any of the naturally occurring L-amino acids
  SITE (141): Xaa equals any of the naturally occurring L-amino acids
  SITE (144): Xaa equals any of the naturally occurring L-amino acids
  SITE (145): Xaa equals any of the naturally occurring L-amino acids
  SITE (147): Xaa equals any of the naturally occurring L-amino acids
  SITE (153): Xaa equals any of the naturally occurring L-amino acids
  SITE (161): Xaa equals any of the naturally occurring L-amino acids
  SITE (162): Xaa equals any of the naturally occurring L-amino acids
  SITE (164): Xaa equals any of the naturally occurring L-amino acids
  SITE (165): Xaa equals any of the naturally occurring L-amino acids
  SITE (170): Xaa equals any of the naturally occurring L-amino acids
  SITE (171): Xaa equals any of the naturally occurring L-amino acids
  SITE (172): Xaa equals any of the naturally occurring L-amino acids
  SITE (178): Xaa equals any of the naturally occurring L-amino acids
GETEGTGDSGLRAAPGGLKNRRQPRRWSPIPGYALGSEKAAAGGHARGGXRGMAAVWQQVLAVDASFGRSISAAQPAAAGXMPRVGTPSAASGXPEASGAXCWAXXTXPLXXKECSVPITTASSGSXRTYSXXGWKDXGRXIPXXPXGARGAXSFPFQKKXXPXXGGGGXXXNRGPSX

SEQ ID NO: 869 - protein, 38 aa, Homo sapiens
VNPKYIVLESDFTNNVVRCNIHYTGRYVSATNCKIVQS

SEQ ID NO: 870 - protein, 119 aa, Homo sapiens
  SITE (13): Xaa equals any of the naturally occurring L-amino acids
  SITE (53): Xaa equals any of the naturally occurring L-amino acids
GKKRGFAFVTFDXHDSVDKIVIQKYHTVNGHNCEVRKALSKQEMASASSSQRXRSGSGNFGGGRGSGFGGNDNFGRGGNFSGRGGFGGSRGGGGYGGSGDGYNGFGNDGSNFGKWWKLQ

SEQ ID NO: 871 - protein, 113 aa, Homo sapiens
  SITE (57): Xaa equals any of the naturally occurring L-amino acids
  SITE (70): Xaa equals any of the naturally occurring L-amino acids
  SITE (87): Xaa equals any of the naturally occurring L-amino acids
  SITE (106): Xaa equals any of the naturally occurring L-amino acids
  SITE (112): Xaa equals any of the naturally occurring L-amino acids
ARGTLLLSTLVAGALSCGVSTYAPDMSRMLGGEEARPNSWPWQVSLQYSSNGQWYHXCGGSLDSQQLGPXGCPLHQFLRDLPRGCWXSMNLLRWQSSGSLGLQCLXRLLVQXG

SEQ ID NO: 872 - protein, 71 aa, Homo sapiens
  SITE (30): Xaa equals any of the naturally occurring L-amino acids
  SITE (35): Xaa equals any of the naturally occurring L-amino acids
  SITE (67): Xaa equals any of the naturally occurring L-amino acids
GAMQEELQWPFPSPGYLLYSTGHRAQWRRXEWRSXDVMNYFAWERNPSTISSPGHCASLSRSTAFLXVERL

SEQ ID NO: 873 - protein, 79 aa, Homo sapiens
  SITE (45): Xaa equals any of the naturally occurring L-amino acids
  SITE (50): Xaa equals any of the naturally occurring L-amino acids
  SITE (78): Xaa equals any of the naturally occurring L-amino acids
  SITE (79): Xaa equals any of the naturally occurring L-amino acids
SRGSDPFLEYNNYGCYCGLGGSSTPVDELDKCCQTHDNCYDQAKXLDSCXFLLDNPYTHTYSYSCSGSAITCYHQKQXX

SEQ ID NO: 874 - protein, 41 aa, Homo sapiens
  SITE (6): Xaa equals any of the naturally occurring L-amino acids
  SITE (8): Xaa equals any of the naturally occurring L-amino acids
  SITE (15): Xaa equals any of the naturally occurring L-amino acids
RSQEYXRXPAARSSXTLWRIRTRLSLCRGPRAAAAALPPAC

SEQ ID NO: 875 - protein, 64 aa, Homo sapiens
  SITE (53): Xaa equals any of the naturally occurring L-amino acids
  SITE (54): Xaa equals any of the naturally occurring L-amino acids
QSPESPRRVQLGRFDRRREPDTDRSWRPFSLSECCSCHCGHGRYPVPVEVHGXXTGRKLAKKAV

SEQ ID NO: 876 - protein, 97 aa, Homo sapiens
SDRPTMAPGVARGPTPYWRLRLGGAALLLLLIPVAAAQEPPGAACSQNTNKTCEECLKNVSCLWCNTNKACLDYPVTSVLPPASLCKLSSARWGVCG

SEQ ID NO: 877 - protein, 54 aa, Homo sapiens
  SITE (3): Xaa equals any of the naturally occurring L-amino acids
  SITE (5): Xaa equals any of the naturally occurring L-amino acids
  SITE (16): Xaa equals any of the naturally occurring L-amino acids
  SITE (28): Xaa equals any of the naturally occurring L-amino acids
  SITE (38): Xaa equals any of the naturally occurring L-amino acids
  SITE (51): Xaa equals any of the naturally occurring L-amino acids
  SITE (52): Xaa equals any of the naturally occurring L-amino acids
AKXRXPRQSCLIHESXCPEGTNAYRSYXYYFNEDPETXVDARSLLPEHEFXXPG

SEQ ID NO: 878 - protein, 74 aa, Homo sapiens
  SITE (64): Xaa equals any of the naturally occurring L-amino acids
  SITE (68): Xaa equals any of the naturally occurring L-amino acids
HYHLLFYSYNDYVREFHNMGPPPPWQGMPPYPGMEQPPHHPYYQHHAPPPQAHPPYSGHHPVPXEARXRDKRIS

SEQ ID NO: 879 - protein, 138 aa, Homo sapiens
  SITE (83): Xaa equals any of the naturally occurring L-amino acids
  SITE (102): Xaa equals any of the naturally occurring L-amino acids
  SITE (107): Xaa equals any of the naturally occurring L-amino acids
  SITE (111): Xaa equals any of the naturally occurring L-amino acids
  SITE (113): Xaa equals any of the naturally occurring L-amino acids
  SITE (115): Xaa equals any of the naturally occurring L-amino acids
  SITE (125): Xaa equals any of the naturally occurring L-amino acids
  SITE (127): Xaa equals any of the naturally occurring L-amino acids
  SITE (132): Xaa equals any of the naturally occurring L-amino acids
  SITE (135): Xaa equals any of the naturally occurring L-amino acids
NSARGELAFLHTSHCLASGEVMISSLGDVKGNGKGGFVLLDGETFEVKGTWERPGGAAPLGYDFWYQPRHNVMISTEWAAPNXLRDGFNPADVEAGENPPMXQQEPXGLHXLXFXVPNLSTPTIXLXIGPRXLKXGWP

SEQ ID NO: 880 - protein, 107 aa, Homo sapiens
QRDFFRTSKKMYPHRPVLMVISHAAPHGPEDSAPQYSRLFPNASQHITPSYNYAPNPDKHWIMRYTGPMKPIHMEFTNMLQRKACRPSCRWTTPWRRFTTCWLRRAS

SEQ ID NO: 881 - protein, 122 aa, Homo sapiens
  SITE (56): Xaa equals any of the naturally occurring L-amino acids
  SITE (88): Xaa equals any of the naturally occurring L-amino acids
MIFNAERVGGLEEERESVGPLREDFSLSSSALIGLLVIAVAIATVIVISLVMLRKXAVWHHQPRDRGGLIQCSPQKNVPEQDAEPCYXNPLPILDRSIRLQDAHLRGSVAEIHIRSMQHTVQ

SEQ ID NO: 882 - protein, 26 aa, Homo sapiens
  SITE (2): Xaa equals any of the naturally occurring L-amino acids
  SITE (10): Xaa equals any of the naturally occurring L-amino acids
  SITE (14): Xaa equals any of the naturally occurring L-amino acids
  SITE (23): Xaa equals any of the naturally occurring L-amino acids
FXNGHQEKNXFLAXQGPKEETVXDFW

SEQ ID NO: 883 - protein, 34 aa, Homo sapiens
QARHLLLGQRVLVLELSCEGDDEDTAFPTLHYEL

SEQ ID NO: 884 - protein, 35 aa, Homo sapiens
  SITE (12): Xaa equals any of the naturally occurring L-amino acids
  SITE (25): Xaa equals any of the naturally occurring L-amino acids
  SITE (26): Xaa equals any of the naturally occurring L-amino acids
  SITE (28): Xaa equals any of the naturally occurring L-amino acids
GPASPHATLGPXPCRVLFSMSFIPXXEXFRLPHPQ

SEQ ID NO: 885 - protein, 73 aa, Homo sapiens
  SITE (1): Xaa equals any of the naturally occurring L-amino acids
  SITE (3): Xaa equals any of the naturally occurring L-amino acids
  SITE (19): Xaa equals any of the naturally occurring L-amino acids
  SITE (66): Xaa equals any of the naturally occurring L-amino acids
XPXMASVVLPSGSQCAAAXRRRRSRAPAPASAVALLRRGTESPQVMGQNLFTKRRDSNRGRGCEPXSCQVNEE

SEQ ID NO: 886 - protein, 108 aa, Homo sapiens
  SITE (6): Xaa equals any of the naturally occurring L-amino acids
  SITE (27): Xaa equals any of the naturally occurring L-amino acids
  SITE (28): Xaa equals any of the naturally occurring L-amino acids
  SITE (30): Xaa equals any of the naturally occurring L-amino acids
  SITE (39): Xaa equals any of the naturally occurring L-amino acids
  SITE (54): Xaa equals any of the naturally occurring L-amino acids
  SITE (69): Xaa equals any of the naturally occurring L-amino acids
  SITE (91): Xaa equals any of the naturally occurring L-amino acids
  SITE (97): Xaa equals any of the naturally occurring L-amino acids
  SITE (99): Xaa equals any of the naturally occurring L-amino acids
DSPMFXWSEPPSCSHLHCPSALFVPCXXKXGAQMVRPEXAAGGIWDTPVGTGCXPGLIPSFHHDRNALXKAGLLGACSPRPPQREPRCFPXPHPFPXHXLTVLLAQPE

SEQ ID NO: 887 - protein, 77 aa, Homo sapiens
  SITE (9): Xaa equals any of the naturally occurring L-amino acids
  SITE (11): Xaa equals any of the naturally occurring L-amino acids
  SITE (15): Xaa equals any of the naturally occurring L-amino acids
  SITE (21): Xaa equals any of the naturally occurring L-amino acids
  SITE (39): Xaa equals any of the naturally occurring L-amino acids
  SITE (40): Xaa equals any of the naturally occurring L-amino acids
  SITE (59): Xaa equals any of the naturally occurring L-amino acids
  SITE (65): Xaa equals any of the naturally occurring L-amino acids
  SITE (66): Xaa equals any of the naturally occurring L-amino acids
  SITE (70): Xaa equals any of the naturally occurring L-amino acids
  SITE (75): Xaa equals any of the naturally occurring L-amino acids
RALRSEDEXAXPVTXGGQSTXEPDSRTPGKHVQMQLSLXXTNNIDPVGKNPNETQGGHXGGHLGXXSDGXALGAXTP

SEQ ID NO: 888 - protein, 54 aa, Homo sapiens
  SITE (1): Xaa equals any of the naturally occurring L-amino acids
  SITE (39): Xaa equals any of the naturally occurring L-amino acids
  SITE (46): Xaa equals any of the naturally occurring L-amino acids
  SITE (47): Xaa equals any of the naturally occurring L-amino acids
  SITE (54): Xaa equals any of the naturally occurring L-amino acids
XGIFRCRAAVRGPRRGLGDCAWRWRRWRPLAAGRAQHLXHARCELXXAEPGLRX

SEQ ID NO: 889 - protein, 54 aa, Homo sapiens
TASSPQPILLPLQPAEELSWAAPISPNKVYIFCVDARPTSFPGFVAVRRKGHEF

SEQ ID NO: 890 - protein, 56 aa, Homo sapiens
  SITE (20): Xaa equals any of the naturally occurring L-amino acids
  SITE (22): Xaa equals any of the naturally occurring L-amino acids
  SITE (23): Xaa equals any of the naturally occurring L-amino acids
  SITE (30): Xaa equals any of the naturally occurring L-amino acids
  SITE (49): Xaa equals any of the naturally occurring L-amino acids
  SITE (53): Xaa equals any of the naturally occurring L-amino acids
  SITE (54): Xaa equals any of the naturally occurring L-amino acids
VTGLDHILDPEEGDTLAHAXGXXGRRSKVXIFFDGSRSISLRKSKINFXSRVXXWF

SEQ ID NO: 891 - protein, 57 aa, Homo sapiens
SLVPCPQARWESLGSAYSGSPLGSKQGGLSLPESDGRVGGLGHLPVPFPKMPSSVPA

SEQ ID NO: 892 - protein, 73 aa, Homo sapiens [sequence omitted]

SEQ ID NO: 893 - protein, 44 aa, Homo sapiens
VLQCPTHKNGKHGSLRLLQSTLLQSKSYSLRKCLLPFLFSSLLV

SEQ ID NO: 894 - protein, 56 aa, Homo sapiens
IMPSSILALGPTRPSSNWEMGRSKAGLMLFRVSSYLELTRPTPVAIPEKSQLPGCL

SEQ ID NO: 895 - protein, 95 aa, Homo sapiens
  SITE (1): Xaa equals any of the naturally occurring L-amino acids
  SITE (9): Xaa equals any of the naturally occurring L-amino acids
  SITE (11): Xaa equals any of the naturally occurring L-amino acids
  SITE (12): Xaa equals any of the naturally occurring L-amino acids
  SITE (17): Xaa equals any of the naturally occurring L-amino acids
  SITE (20): Xaa equals any of the naturally occurring L-amino acids
  SITE (21): Xaa equals any of the naturally occurring L-amino acids
  SITE (23): Xaa equals any of the naturally occurring L-amino acids
  SITE (24): Xaa equals any of the naturally occurring L-amino acids
  SITE (28): Xaa equals any of the naturally occurring L-amino acids
  SITE (34): Xaa equals any of the naturally occurring L-amino acids
  SITE (41): Xaa equals any of the naturally occurring L-amino acids
  SITE (43): Xaa equals any of the naturally occurring L-amino acids
  SITE (45): Xaa equals any of the naturally occurring L-amino acids
  SITE (49): Xaa equals any of the naturally occurring L-amino acids
  SITE (60): Xaa equals any of the naturally occurring L-amino acids
  SITE (86): Xaa equals any of the naturally occurring L-amino acids
  SITE (89): Xaa equals any of the naturally occurring L-amino acids
  SITE (94): Xaa equals any of the naturally occurring L-amino acids
  SITE (95): Xaa equals any of the naturally occurring L-amino acids
XSKPLPLRXPXXRLLIXDKXXLXXHRFXILKQMXHKVRDSXGXIXDKTXLDMRVYGLRAXVLGLEQQIALMCKPFNNSLFRRHFFXAKXSWMQXX

SEQ ID NO: 896 - protein, 148 aa, Homo sapiens
  SITE (4): Xaa equals any of the naturally occurring L-amino acids
  SITE (6): Xaa equals any of the naturally occurring L-amino acids
  SITE (12): Xaa equals any of the naturally occurring L-amino acids
  SITE (15): Xaa equals any of the naturally occurring L-amino acids
  SITE (41): Xaa equals any of the naturally occurring L-amino acids
  SITE (94): Xaa equals any of the naturally occurring L-amino acids
  SITE (95): Xaa equals any of the naturally occurring L-amino acids
  SITE (102): Xaa equals any of the naturally occurring L-amino acids
  SITE (103): Xaa equals any of the naturally occurring L-amino acids
  SITE (104): Xaa equals any of the naturally occurring L-amino acids
  SITE (107): Xaa equals any of the naturally occurring L-amino acids
  SITE (108): Xaa equals any of the naturally occurring L-amino acids
  SITE (109): Xaa equals any of the naturally occurring L-amino acids
  SITE (115): Xaa equals any of the naturally occurring L-amino acids
  SITE (116): Xaa equals any of the naturally occurring L-amino acids
  SITE (117): Xaa equals any of the naturally occurring L-amino acids
  SITE (119): Xaa equals any of the naturally occurring L-amino acids
  SITE (122): Xaa equals any of the naturally occurring L-amino acids
  SITE (129): Xaa equals any of the naturally occurring L-amino acids
  SITE (132): Xaa equals any of the naturally occurring L-amino acids
  SITE (134): Xaa equals any of the naturally occurring L-amino acids
  SITE (137): Xaa equals any of the naturally occurring L-amino acids
  SITE (138): Xaa equals any of the naturally occurring L-amino acids
  SITE (139): Xaa equals any of the naturally occurring L-amino acids
  SITE (142): Xaa equals any of the naturally occurring L-amino acids
  SITE (148): Xaa equals any of the naturally occurring L-amino acids
GCQXLXWTSWSXRSXRVCQAHLVKKVKMGMLVPWGHLVLQXQEVLKVPMELMDHKDPQGLFGSVGGVGEKGEPGVSREPRASWGKQVLGGPQSXXEVEKGGXXXSTXXXLGTSQXXXGXTRXCFGPKGXPGXFXVFXXXSGXFGGFWX

SEQ ID NO: 897 - protein, 61 aa, Homo sapiens
  SITE (5): Xaa equals any of the naturally occurring L-amino acids
  SITE (16): Xaa equals any of the naturally occurring L-amino acids
  SITE (18): Xaa equals any of the naturally occurring L-amino acids
  SITE (25): Xaa equals any of the naturally occurring L-amino acids
  SITE (26): Xaa equals any of the naturally occurring L-amino acids
  SITE (40): Xaa equals any of the naturally occurring L-amino acids
  SITE (44): Xaa equals any of the naturally occurring L-amino acids
  SITE (46): Xaa equals any of the naturally occurring L-amino acids
  SITE (57): Xaa equals any of the naturally occurring L-amino acids
  SITE (60): Xaa equals any of the naturally occurring L-amino acids
APGQXGEIGPSGLTGXRXFPGSPGXXGLPGSMGSPGTPSXDHGXTXGPGIVQTIDDXHCXF

SEQ ID NO: 898 - protein, 37 aa, Homo sapiens
EQLKEHTRLCSKIVGRFIGRGDKPTEPGDSWLSKIES

SEQ ID NO: 899 - protein, 50 aa, Homo sapiens
  SITE (39): Xaa equals any of the naturally occurring L-amino acids
DPQLAGGQISRVGQRGKNIASVGDAVQLPKGVRNGNAEXWEKGSGGGRRG

SEQ ID NO: 900 - protein, 53 aa, Homo sapiens
  SITE (5): Xaa equals any of the naturally occurring L-amino acids
  SITE (6): Xaa equals any of the naturally occurring L-amino acids
  SITE (11): Xaa equals any of the naturally occurring L-amino acids
  SITE (20): Xaa equals any of the naturally occurring L-amino acids
  SITE (26): Xaa equals any of the naturally occurring L-amino acids
  SITE (36): Xaa equals any of the naturally occurring L-amino acids
  SITE (40): Xaa equals any of the naturally occurring L-amino acids
  SITE (45): Xaa equals any of the naturally occurring L-amino acids
  SITE (46): Xaa equals any of the naturally occurring L-amino acids
  SITE (49): Xaa equals any of the naturally occurring L-amino acids
IILIXXSLSKXLGMFSVIGXRYQFPXLSFDIQYLIXTLHXWSSKXXLQXCQII

SEQ ID NO: 901 - protein, 53 aa, Homo sapiens
  SITE (2): Xaa equals any of the naturally occurring L-amino acids
  SITE (19): Xaa equals any of the naturally occurring L-amino acids
AXRVSKFSTWINQVIAYNXAHHRPSPAQPIKDPGPVPSCIHVCLPGSGERRGC

SEQ ID NO: 902 - protein, 83 aa, Homo sapiens
  SITE (37): Xaa equals any of the naturally occurring L-amino acids
  SITE (44): Xaa equals any of the naturally occurring L-amino acids
  SITE (45): Xaa equals any of the naturally occurring L-amino acids
  SITE (71): Xaa equals any of the naturally occurring L-amino acids
  SITE (76): Xaa equals any of the naturally occurring L-amino acids
  SITE (83): Xaa equals any of the naturally occurring L-amino acids
SKKMVFLPLKWSLATMSFLLSSLLALLTVSTPSWCQXTEASPKXXDGTPFPWNKIRLPEYVIPVQYKSLDXCKPYXADFWGNX

SEQ ID NO: 903 - protein, 104 aa, Homo sapiens
  SITE (27): Xaa equals any of the naturally occurring L-amino acids
  SITE (33): Xaa equals any of the naturally occurring L-amino acids
  SITE (92): Xaa equals any of the naturally occurring L-amino acids
  SITE (102): Xaa equals any of the naturally occurring L-amino acids
  SITE (104): Xaa equals any of the naturally occurring L-amino acids
GTSLKFFFLFKILPGYVFILIKFGCSXISLCKXTLIFSPKWNDERFFSPLPYAPLKSYMSLYYLAIMGIFISTVVLFWSAPYPVNISIVLQXLCSLFCQGSXVX

SEQ ID NO: 904 - protein, 24 aa, Homo sapiens
  SITE (7): Xaa equals any of the naturally occurring L-amino acids
  SITE (21): Xaa equals any of the naturally occurring L-amino acids
  SITE (23): Xaa equals any of the naturally occurring L-amino acids
  SITE (24): Xaa equals any of the naturally occurring L-amino acids
GTSEFFXFFFFFFFFFFFFFXFXX

SEQ ID NO: 905 - protein, 50 aa, Homo sapiens
GNKTLHLIPITSSIIFQLIIKSVLGNTLRTFMMQQMLTKGLVGRYSGNVH

SEQ ID NO: 906 - protein, 55 aa, Homo sapiens
  SITE (13): Xaa equals any of the naturally occurring L-amino acids
  SITE (24): Xaa equals any of the naturally occurring L-amino acids
  SITE (32): Xaa equals any of the naturally occurring L-amino acids
  SITE (47): Xaa equals any of the naturally occurring L-amino acids
  SITE (52): Xaa equals any of the naturally occurring L-amino acids
  SITE (55): Xaa equals any of the naturally occurring L-amino acids
EIWSSILLRQQPXESNLSLPADDXPSMNRLGXQQVPSFMELSLKDPXVLKLXGRX

SEQ ID NO: 907 - protein, 75 aa, Homo sapiens
  SITE (3): Xaa equals any of the naturally occurring L-amino acids
  SITE (9): Xaa equals any of the naturally occurring L-amino acids
  SITE (16): Xaa equals any of the naturally occurring L-amino acids
  SITE (26): Xaa equals any of the naturally occurring L-amino acids
  SITE (33): Xaa equals any of the naturally occurring L-amino acids
  SITE (36): Xaa equals any of the naturally occurring L-amino acids
  SITE (38): Xaa equals any of the naturally occurring L-amino acids
  SITE (41): Xaa equals any of the naturally occurring L-amino acids
  SITE (47): Xaa equals any of the naturally occurring L-amino acids
  SITE (48): Xaa equals any of the naturally occurring L-amino acids
  SITE (70): Xaa equals any of the naturally occurring L-amino acids
KRXRPNLFXKVKGGFXPKGPSREKNXPGPGKKXLGXKXRVXGIKRGXXLTFPPGFFPLGFSQKNFFPKGXPKKIF

SEQ ID NO: 908 - protein, 28 aa, Homo sapiens
  SITE (10): Xaa equals any of the naturally occurring L-amino acids
  SITE (19): Xaa equals any of the naturally occurring L-amino acids
  SITE (24): Xaa equals any of the naturally occurring L-amino acids
  SITE (27): Xaa equals any of the naturally occurring L-amino acids
FFFQKYVHIXIMPKVPPGXVKARXPGXW

SEQ ID NO: 909 - protein, 141 aa, Homo sapiens
CLCPAPRGGAYRGRQASLSCGGLHPVRASWLLCLPKQAWAMVGAPPTASLPPCSLISDCCASNQRDSMGVGPSEPGAGYNLLVHHSLSPSEKHSIRVGVTQFSRCRLSPLSLTRKGTSLTPCASRVKQCLNLLRLTHGGLH

SEQ ID NO: 910 - protein, 47 aa, Homo sapiens [sequence omitted]

SEQ ID NO: 911 - protein, 84 aa, Homo sapiens
  SITE (60): Xaa equals any of the naturally occurring L-amino acids
MQELGFQPSLLTHWAAQSSASSADSCHSLAGGGPLVFHTRVKWSWCSLSGVLGWGILCHXQERLHLPVISPAPSVPRGLPGPQP

SEQ ID NO: 912 - protein, 30 aa, Homo sapiens
  SITE (12): Xaa equals any of the naturally occurring L-amino acids
  SITE (17): Xaa equals any of the naturally occurring L-amino acids
  SITE (26): Xaa equals any of the naturally occurring L-amino acids
  SITE (28): Xaa equals any of the naturally occurring L-amino acids
GWLAGEVLPPVXPPGPXSTSLRKTTXPXDP

SEQ ID NO: 913 - protein, 125 aa, Homo sapiens
  SITE (61): Xaa equals any of the naturally occurring L-amino acids
  SITE (93): Xaa equals any of the naturally occurring L-amino acids
  SITE (124): Xaa equals any of the naturally occurring L-amino acids
VSTTEGYGCVEDDRRGLLSNCLTACSSHWCELQHPLCSKWTPTALAPLVAPARAPAPASAXSANAPPARRAAVPAAPWAVPSVPRAASAKGHXKNAAAVPDVGTALLPDVNRTTCTTWIFLKIXH

SEQ ID NO: 914 - protein, 59 aa, Homo sapiens
  SITE (33): Xaa equals any of the naturally occurring L-amino acids
  SITE (37): Xaa equals any of the naturally occurring L-amino acids
  SITE (52): Xaa equals any of the naturally occurring L-amino acids
VLEFYIRKTKLLSLASSVLPFVSLLILFLGGGXFAFXSSWHNFHFILLSVYXNFPLSRL

SEQ ID NO: 915 - protein, 95 aa, Homo sapiens
  SITE (29): Xaa equals any of the naturally occurring L-amino acids
  SITE (68): Xaa equals any of the naturally occurring L-amino acids
  SITE (82): Xaa equals any of the naturally occurring L-amino acids
  SITE (89): Xaa equals any of the naturally occurring L-amino acids
ADAWAALDRSCRPGIPVSRWTRLPRALAXHLLTQLRGFGILWPHCEEIGSGSEATGRLPLPEIWSEEXPPSSHHSKEVHENXSVIPFNXVDITFI

SEQ ID NO: 916 - protein, 62 aa, Homo sapiens
  SITE (54): Xaa equals any of the naturally occurring L-amino acids
  SITE (61): Xaa equals any of the naturally occurring L-amino acids
  SITE (62): Xaa equals any of the naturally occurring L-amino acids
IWRSDFVAKILPRWCWVLLVASCQEADNAGASLLVMLRLLGGFGVLGFNHSLQXSTFYLTXX

SEQ ID NO: 917 - protein, 36 aa, Homo sapiens
  SITE (11): Xaa equals any of the naturally occurring L-amino acids
  SITE (31): Xaa equals any of the naturally occurring L-amino acids
EKTRQCTLPMXVSHNTDVTFICFISHLVSKXFGGRG

SEQ ID NO: 918 - protein, 74 aa, Homo sapiens
HESPERGRPHERARSRERDLSRDRSRGRSLERGLDQDHARTRDRSRGRSLERGLDHDFGPSRDRDRDRSRGPEH

SEQ ID NO: 919 - DNA, 733 bp, Homo sapiens
gggatccggagcccaaatcttctgacaaaactcacacatgcccaccgtgcccagcacctgaattcgagggtgcaccgtcagtcttcctcttccccccaaaacccaaggacaccctcatgatctcccggactcctgaggtcacatgcgtggtggtggacgtaagccacgaagaccctgaggtcaagttcaactggtacgtggacggcgtggaggtgcataatgccaagacaaagccgcgggaggagcagtacaacagcacgtaccgtgtggtcagcgtcctcaccgtcctgcaccaggactggctgaatggcaaggagtacaagtgcaaggtctccaacaaagccctcccaacccccatcgagaaaaccatctccaaagccaaagggcagccccgagaaccacaggtgtacaccctgcccccatcccgggatgagctgaccaagaaccaggtcagcctgacctgcctggtcaaaggcttctatccaagcgacatcgccgtggagtgggagagcaatgggcagccggagaacaactacaagaccacgcctcccgtgctggactccgacggctccttcttcctctacagcaagctcaccgtggacaagagcaggtggcagcaggggaacgtcttctcatgctccgtgatgcatgaggctctgcacaaccactacacgcagaagagcctctccctgtctccgggtaaatgagtgcgacggccgcgactctagaggat

SEQ ID NO: 920 - protein, 5 aa, Homo sapiens
  SITE (3): Xaa equals any of the naturally occurring L-amino acids
WSXWS

SEQ ID NO: 921 - DNA, 86 bp, Homo sapiens
gcgcctcgagatttccccgaaatctagatttccccgaaatgatttccccgaaatgatttccccgaaatatctgccatctcaattag

SEQ ID NO: 922 - DNA, 27 bp, Homo sapiens
gcggcaagctttttgcaaagcctaggc

SEQ ID NO: 923 - DNA, 271 bp, Homo sapiens
ctcgagatttccccgaaatctagatttccccgaaatgatttccccgaaatgatttccccgaaatatctgccatctcaattagtcagcaaccatagtcccgcccctaactccgcccatcccgcccctaactccgcccagttccgcccattctccgccccatggctgactaattttttttatttatgcagaggccgaggccgcctcggcctctgagctattccagaagtagtgaggaggcttttttggaggcctaggcttttgcaaaaagctt

SEQ ID NO: 924 - DNA, 32 bp, Homo sapiens
gcgctcgagggatgacagcgatagaaccccgg

SEQ ID NO: 925 - DNA, 31 bp, Homo sapiens
gcgaagcttcgcgactccccggatccgcctc

SEQ ID NO: 926 - DNA, 12 bp, Homo sapiens
ggggactttccc

SEQ ID NO: 927 - DNA, 73 bp, Homo sapiens
gcggcctcgaggggactttcccggggactttccggggactttccgggactttccatcctgccatctcaattag

SEQ ID NO: 928 - DNA, 256 bp, Homo sapiens
ctcgaggggactttcccggggactttccggggactttccgggactttccatctgccatctcaattagtcagcaaccatagtcccgcccctaactccgcccatcccgcccctaactccgcccagttccgcccattctccgccccatggctgactaattttttttatttatgcagaggccgaggccgcctcggcctctgagctattccagaagtagtgaggaggcttttttggaggcctaggcttttgcaaaaagctt
